(19) United States
(12) Patent Application Publication
(10) Pub. No.: US 2022/0403323 A1
(43) Pub. Date: Dec. 22, 2022

(54) TEXTURING L. LACTIS WITH UNIQUE EPS GENE CLUSTERS

(71) Applicant: Chr. Hansen A/S, Hoersholm (DK)

(72) Inventors: Vera Kuzina POULSEN, Hoersholm (DK); Gunnar OEREGAARD, Hoersholm (DK); Elahe Ghanei MOGHADAM, Hoersholm (DK)

(73) Assignee: Chr. Hansen A/S, Hoersholm (DK)

(21) Appl. No.: 17/634,909

(22) PCT Filed: Aug. 21, 2020
(86) PCT No.: PCT/EP2020/073522

§ 371 Date: Feb. 11, 2022

(30) Foreign Application Priority Data
Aug. 23, 2019 (EP) 19193295.3
Aug. 23, 2019 (EP) 19193299.5
Aug. 23, 2019 (EP) 19193303.5
Aug. 23, 2019 (EP) 19193305.0
Aug. 23, 2019 (EP) 19193307.6
Aug. 23, 2019 (EP) 19193308.4
Aug. 23, 2019 (EP) 19193310.0
Aug. 23, 2019 (EP) 19193312.6
Aug. 23, 2019 (EP) 19193313.4
Aug. 23, 2019 (EP) 19193315.9
Aug. 23, 2019 (EP) 19193316.7

(51) Int. Cl. C12N 1/20; A23C 11/10; C12N 1/04; A23C 9/123; C12N 9/10; C12N 15/52; C12N 9/12; C12N 9/14

(52) U.S. Cl. CPC C12N 1/205; A23C 11/106; C12N 1/04; A23C 9/1234; C12N 9/1048; C12N 15/52; C12N 9/1241; C12N 9/14; C12R 2001/225

(57) ABSTRACT

The present invention provides novel Lactococcus lactis lactic acid bacterium strains having improved texturing properties and methods of using the strains for producing food products.

### CROSS-REFERENCE TO RELATED APPLICATIONS

[0001] The present application is the U.S. National Stage of International Application No. PCT/EP2020/073522, filed Aug. 21, 2020, and claims priority to European Patent Application Nos. 19193295.3, 19193299.5, 19193303.5, 19193305.0, 19193307.6, 19193308.4, 19193310.0, 19193312.6, 19193313.4, 19193315.9, and 19193316.7, all filed Aug. 23, 2019.

### FIELD OF THE INVENTION

[0002] The present invention relates to novel Lactococcus lactic lactic acid bacterium (LAB) strains, having improved texturing properties. The present invention also relates to methods of using the strains for making food products and to food products comprising the strains.

### BACKGROUND OF THE INVENTION

[0003] Lactic acid bacteria (LAB) are used extensively by the food industry for fermentation of food. Conversion of fresh milk to fermented milk by LAB is a way of extending the life time of the milk and provides taste as well as texture.

[0004] Thus, important features of the strains used for milk fermentation include fast acidification, stable (no/low) post-acidification, long shelf-life and good texture. Good texture is typically high mouth thickness and viscosity (measured as high shear stress using a rheometer) and high gel firmness.

[0005] Some LAB strains contribute significantly to an improved texture associated with their ability to produce exo- (or extracellular) polysaccharides (EPS), which can be capsular (remain attached to the cell in the form of capsules) or secreted into the media. EPS consists of either a single type of sugar (homo-exopolysaccharides) or repeating units made of different sugars (hetero-exopolysaccharides). EPS-producing LAB are of interest, since EPS act as natural viscosifiers and texture enhancers of fermented foods. Furthermore, EPS from food-grade LAB with defined rheological properties have potential for development and exploitation as food additives. EPS are known to improve the rheological properties of LAB-fermented products by influencing viscosity, syneresis, firmness and sensory properties. The primary structural features (monosaccharide type and configuration, glycosidic linkage, non-sugar decorations, charge), the conformation and molecular weight, the amount of polysaccharide and the interactions of the polysaccharide with other system components are all factors that can contribute to and influence the displayed techno-functional properties (Zeidan et al., 2017).

[0006] Fermented milk can be produced by mesophilic LAB, e.g. Lactococcus sp. leading to, e.g., sour milk, or thermophilic LAB, e.g., Streptococcus thermophilus and Lactobacillus delbruckii subsp. bulgaricus, for yoghurt. Dairy products, such as fresh cheese, butter milk, sour milk and sour cream, prepared with mesophilic starter cultures, such as Lactococcus lactis, are in popular demand with consumers. In addition, market for dairy alternative products, where plant bases fermented with L. lactis can play a role, is growing. Consumers with lactose intolerance and milk allergy, as well as consumers with concerns about cow milk hormones and cholesterol, animal well-being and impact of animal-based food on the environment play a role in the increasing demand. Also, plant-based diet is supposedly healthier than meat-based diet (Tangyu et al., 2019).

[0007] Several texturing L. lactis strains have been reported, e.g. NIZO B40, SMQ-461, Ropy352, JFR1, LIi3, LII8 (for a review see Poulsen et al., 2019). The structure of EPS of NIZO B40 has been elucidated and the functional characterization of genes responsible for the EPS biosynthesis has been performed (Kleerebezem et al., 2002).

[0008] Pan and Mei (2010) characterized EPS produced by L. lactis subsp. lactis, which was isolated from Chinese pickled cabbage, but it is not known if this strain is able to acidify milk and contribute to its texture. No eps genes were reported for this strain (Pan and Mei, 2010).

[0009] Suzuki et al. (2013) reported the sequences of a highly conserved epsD gene and a strain-specific epsE gene in five lactococcal strains, two from the subsp. lactis biovar diacetylactis and two from the subsp. cremoris. However, neither information on a complete eps gene cluster nor if the EPS produced by these strains is able to enhance milk texture is available.

[0010] WO 2017/108679 relates to the novel strain Lactococcus lactis subsp. lactis DSM 29291, which had the highest shear stress out of the eight different L. lactis subsp. lactis strains tested, both according to the TADM and the rheometer measurements (see Example 1 and FIG. 1 of WO 2017/108679).

[0011] Since mesophilic cultures are used for fermented milk products, and texture is an important parameter, there is a need for further texturing mesophilic strains, in particular for improved texturing mesophilic strains, e.g., texturing Lactococcus lactis strains.

### SUMMARY OF THE INVENTION

[0012] In a first aspect, the present invention relates to a Lactococcus lactis lactic acid bacterium strain comprising an active eps gene cluster capable of producing exopolysaccharide (EPS), wherein the eps gene cluster comprises the below nucleotide sequences ((a), (b) and (c), as the case may be) as defined in any one of (i) to (x):
[0013] (i) (a): a nucleotide sequence encoding a polypeptide having polymerase activity and having at least 95% identity with the amino acid sequence encoded by the nucleotide sequence of SEQ ID NO: 11 (herein termed wzy);
   [0014] (b): a nucleotide sequence encoding a polypeptide having polysaccharide transporter activity and having at least 95% identity with the amino acid sequence encoded by the nucleotide sequence of SEQ ID NO: 17 (herein termed wzx); and
   [0015] (c): a nucleotide sequence encoding a polypeptide having glycosyltransferase (GT) activity comprising:
   [0016] (c1): a nucleotide sequence having at least 95% identity with the amino acid sequence encoded by the nucleotide sequence of SEQ ID NO: 9 (herein termed GT1);
   [0017] (c2): a nucleotide sequence having at least 95% identity with the amino acid sequence encoded by the nucleotide sequence of SEQ ID NO: 13 (herein termed GT2); and
   [0018] (c3): a nucleotide sequence having at least 95% identity with the amino acid sequence encoded by the nucleotide sequence of SEQ ID NO: 15 (herein termed GT3);
[0019] (ii) (a): a nucleotide sequence encoding a polypeptide having polymerase activity and having at least 95% identity with the amino acid sequence encoded by nucleotides 13939-15042 of SEQ ID NO:199 (herein termed wzy);
   [0020] (b): a nucleotide sequence encoding a polypeptide having polysaccharide transporter activity and having at least 95% identity with the amino acid sequence encoded by nucleotides 26029-27444 of the complementary strand of SEQ ID NO:199 (herein termed wzx); and
   [0021] (c): a nucleotide sequence encoding a polypeptide having glycosyltransferase (GT) activity comprising:
   [0022] (c1): a nucleotide sequence having at least 95% identity with the amino acid sequence encoded by nucleotides 4174-4824 of SEQ ID NO:199 (herein termed GT1);
   [0023] (c2): a nucleotide sequence having at least 95% identity with the amino acid sequence encoded by nucleotides 7276-8508 of SEQ ID NO:199 (herein termed GT2);
   [0024] (c3): a nucleotide sequence having at least 95% identity with the amino acid sequence encoded by nucleotides 11042-12391 of SEQ ID NO:199 (herein termed GT3);
   [0025] (c4): a nucleotide sequence having at least 95% identity with the amino acid sequence encoded by nucleotides 13008-13934 of SEQ ID NO:199 (herein termed GT4); and
   [0026] (c5): a nucleotide sequence having at least 95% identity with the amino acid sequence encoded by nucleotides 18528-19508 of SEQ ID NO:199 (herein termed GT5);
[0027] (iii) (a): a nucleotide sequence encoding a polypeptide having polymerase activity and having at least 95% identity with the amino acid sequence encoded by the nucleotide sequence of SEQ ID NO: 39 (herein termed wzy);
   [0028] (b): a nucleotide sequence encoding a polypeptide having polysaccharide transporter activity and having at least 95% identity with the amino acid sequence encoded by the nucleotide sequence of SEQ ID NO: 45 (herein termed wzx);
   [0029] (c): a nucleotide sequence encoding a polypeptide having glycosyltransferase (GT) activity comprising:
   [0030] (c1): a nucleotide sequence having at least 95% identity with the amino acid sequence encoded by the nucleotide sequence of SEQ ID NO: 37 (herein termed GT1);
   [0031] (c2): a nucleotide sequence having at least 95% identity with the amino acid sequence encoded by the nucleotide sequence of SEQ ID NO: 41 (herein termed GT2); and
   [0032] (c3): a nucleotide sequence having at least 95% identity with the amino acid sequence encoded by the nucleotide sequence of SEQ ID NO: 43 (herein termed GT3);
[0033] (iv) (a): a nucleotide sequence encoding a polypeptide having polymerase activity and having at least 95% identity with the amino acid sequence encoded by the nucleotide sequence of SEQ ID NO: 163 (herein termed wzy);
   [0034] (b): a nucleotide sequence encoding a polypeptide having polysaccharide transporter activity and having at least 95% identity with the amino acid sequence encoded by the nucleotide sequence of SEQ ID NO: 169 (herein termed wzx); and
   [0035] (c): a nucleotide sequence encoding a polypeptide having glycosyltransferase (GT) activity comprising:
   [0036] (c1): a nucleotide sequence having at least 95% identity with the amino acid sequence encoded by the nucleotide sequence of SEQ ID NO: 161 (herein termed GT1);
   [0037] (c2): a nucleotide sequence having at least 95% identity with the amino acid sequence encoded by the nucleotide sequence of SEQ ID NO: 165 (herein termed GT2);
   [0038] (c3): a nucleotide sequence having at least 95% identity with the amino acid sequence encoded by the nucleotide sequence of SEQ ID NO: 167 (herein termed GT3); and
   [0039] (c4) a nucleotide sequence having at least 95% identity with the amino acid sequence encoded by the nucleotide sequence of SEQ ID NO: 181 (herein termed GT4);
[0040] (v) (a): a nucleotide sequence encoding a polypeptide having polymerase activity and having at least 95% identity with the amino acid sequence encoded by nucleotides 13939-15042 of SEQ ID NO: 224 (herein termed wzy); and
   [0041] (c): a nucleotide sequence encoding a polypeptide having glycosyltransferase (GT) activity comprising:
   [0042] (c1): a nucleotide sequence having at least 95% identity with the amino acid sequence encoded by nucleotides 4174-4824 of SEQ ID NO: 224 (herein termed GT1);
   [0043] (c2): a nucleotide sequence having at least 95% identity with the amino acid sequence encoded by nucleotides 11042-12391 of SEQ ID NO: 224 (herein termed GT2);
   [0044] (c3): a nucleotide sequence having at least 95% identity with the amino acid sequence encoded by nucleotides 13008-13934 of SEQ ID NO: 224 (herein termed GT3); and
   [0045] (c4): a nucleotide sequence having at least 95% identity with the amino acid sequence encoded by nucleotides 18527-19507 of SEQ ID NO: 224 (herein termed GT4);
[0046] (vi) (a): a nucleotide sequence encoding a polypeptide having polymerase activity and having at least 95% identity with the amino acid sequence encoded by the nucleotide sequence of SEQ ID NO: 67 (herein termed wzy);
   [0047] (b): a nucleotide sequence encoding a polypeptide having polysaccharide transporter activity and having at least 95% identity with the amino acid sequence encoded by the nucleotide sequence of SEQ ID NO: 73 (herein termed wzx);
   [0048] (c): a nucleotide sequence encoding a polypeptide having glycosyltransferase (GT) activity comprising:
   [0049] (c1): a nucleotide sequence having at least 95% identity with the amino acid sequence encoded by the nucleotide sequence of SEQ ID NO: 65 (herein termed GT1);
   [0050] (c2): a nucleotide sequence having at least 95% identity with the amino acid sequence encoded by the nucleotide sequence of SEQ ID NO: 69 (herein termed GT2); and
   [0051] (c3): a nucleotide sequence having at least 95% identity with the amino acid sequence encoded by the nucleotide sequence of SEQ ID NO: 71 (herein termed GT3);
   [0052] (c4): a nucleotide sequence having at least 95% identity with the amino acid sequence encoded by the nucleotide sequence of SEQ ID NO: 85 (herein termed GT4);
   [0053] (c5): a nucleotide sequence having at least 95% identity with the amino acid sequence encoded by the nucleotide sequence of SEQ ID NO: 87 (herein termed GT5); and
   [0054] (c6): a nucleotide sequence having at least 95% identity with the amino acid sequence encoded by the nucleotide sequence of SEQ ID NO: 89 (herein termed GT6);
[0055] (vii) (a): a nucleotide sequence encoding a polypeptide having polymerase activity and having at least 95% identity with the amino acid sequence encoded by nucleotides 5833-6927 of SEQ ID NO: 244 (herein termed wzy); and
   [0056] (c): a nucleotide sequence encoding a polypeptide having glycosyltransferase (GT) activity comprising:
   [0057] (c1): a nucleotide sequence having at least 95% identity with the amino acid sequence encoded by nucleotides 4617-5123 of SEQ ID NO: 244 (herein termed GT1); and
   [0058] (c2): a nucleotide sequence having at least 95% identity with the amino acid sequence encoded by nucleotides 5120-5827 of SEQ ID NO: 244 (herein termed GT2);
[0059] (viii) (a): a nucleotide sequence encoding a polypeptide having polymerase activity and having at least 95% identity with the amino acid sequence encoded by the nucleotide sequence of SEQ ID NO: 123 (herein termed wzy);
   [0060] (b): a nucleotide sequence encoding a polypeptide having polysaccharide transporter activity and having at least 95% identity with the amino acid sequence encoded by the nucleotide sequence of SEQ ID NO: 129 (herein termed wzx); and
   [0061] (c): a nucleotide sequence encoding a polypeptide having glycosyltransferase (GT) activity comprising:
   [0062] (c1): a nucleotide sequence having at least 95% identity with the amino acid sequence encoded by the nucleotide sequence of SEQ ID NO: 121 (herein termed GT1);
   [0063] (c2): a nucleotide sequence having at least 95% identity with the amino acid sequence encoded by the nucleotide sequence of SEQ ID NO: 125 (herein termed GT2);
   [0064] (c3): a nucleotide sequence having at least 95% identity with the amino acid sequence encoded by the nucleotide sequence of SEQ ID NO: 127 (herein termed GT3);
   [0065] (c4): a nucleotide sequence having at least 95% identity with the amino acid sequence encoded by the nucleotide sequence of SEQ ID NO: 143 (herein termed GT4); and
   [0066] (c5): a nucleotide sequence having at least 95% identity with the amino acid sequence encoded by the nucleotide sequence of SEQ ID NO: 145 (herein termed GT5); and
   [0067] (c6): a nucleotide sequence having at least 95% identity with the amino acid sequence encoded by the nucleotide sequence of SEQ ID NO: 147 (herein termed GT6);
[0068] (ix) (a): a nucleotide sequence encoding a polypeptide having polymerase activity and having at least 95% identity with the amino acid sequence encoded by nucleotides 11201-12349 of the complementary strand of SEQ ID NO: 257 (herein termed wzy);
   [0069] (b): a nucleotide sequence encoding a polypeptide having polysaccharide transporter activity and having at least 95% identity with the amino acid sequence encoded by nucleotides 15538-16953 of the complementary strand of SEQ ID NO: 257 (herein termed wzx); and
   [0070] (c): a nucleotide sequence encoding a polypeptide having glycosyltransferase (GT) activity comprising:
   [0071] (c1): a nucleotide sequence having at least 95% identity with the amino acid sequence encoded by nucleotides 9726-10673 of the complementary strand of SEQ ID NO: 257 (herein termed GT1);
   [0072] (c2): a nucleotide sequence having at least 95% identity with the amino acid sequence encoded by nucleotides 12336-13421 of the complementary strand of SEQ ID NO: 257 (herein termed GT2); and
   [0073] (c3): a nucleotide sequence having at least 95% identity with the amino acid sequence encoded by nucleotides 13418-14260 of the complementary strand of SEQ ID NO: 257 (herein termed GT3);
[0074] (x) (a): a nucleotide sequence encoding a polypeptide having polymerase activity and having at least 95% identity with the amino acid sequence encoded by nucleotides 10707-11846 of the complementary strand of SEQ ID NO: 274 (herein termed wzy);
   [0075] (b): a nucleotide sequence encoding a polypeptide having polysaccharide transporter activity and having at least 95% identity with the amino acid sequence encoded by nucleotides 15037-16476 of the complementary strand of SEQ ID NO: 274 (herein termed wzx); and
   [0076] (c): a nucleotide sequence encoding a polypeptide having glycosyltransferase (GT) activity comprising:
   [0077] (c1): a nucleotide sequence having at least 95% identity with the amino acid sequence encoded by nucleotides 9232-10179 of the complementary strand of SEQ ID NO: 274 (herein termed GT1);
   [0078] (c2): a nucleotide sequence having at least 95% identity with the amino acid sequence encoded by nucleotides 11833-12918 of the complementary strand of SEQ ID NO: 274 (herein termed GT2); and
   [0079] (c3): a nucleotide sequence having at least 95% identity with the amino acid sequence encoded by nucleotides 12915-13757 of the complementary strand of SEQ ID NO: 274 (herein termed GT3);

[0080] The present invention further provides strain Lactococcus lactis subsp. lactis DSM 33192.

[0081] In a second aspect, the present invention relates to a composition comprising at least one texturing Lactococcus lactis lactic acid bacterium strain according to the present invention, as described above, preferably in combination with one or more further lactic acid bacterium strain(s), wherein the one or more further lactic acid bacterium strain(s) is(are) able to:
[0082] i) generate fermented milks with a target pH of about 4.55 in about 15 h or less, preferably in about 12 h or less, measured under the following conditions:

[0083] 200 ml semi-fat milk (1.5% fat) is heated to 90° C. for 20 min, followed by cooling to inoculation temperature (30° C.), and inoculated with 2 ml of an overnight culture of the lactic acid bacterium strain, and left at inoculation temperature until a target pH of about 4.55 is reached. Therefore, the “time-to-pH 4.55” can be calculated for a certain lactic acid bacterium strain; and
[0084] ii) generate fermented milks having a shear stress of 40 Pa or more measured at shear rate 300 s⁻¹, measured under following conditions:

[0085] 200 ml semi-fat milk (1.5% fat) is heated to 90° C. for 20 min, followed by cooling to inoculation temperature, and inoculated with 2 ml of an overnight culture of the lactic acid bacterium strain, and left at inoculation temperature until pH 4.55, time to pH 4.55) followed by storage at 4° C. until shear stress is measured, typically from 1-7 days, such as for 5 days, followed by gently stirring and measuring the shear stress at shear rate 300 s⁻¹, measured as described in the present application, wherein the inoculation temperature is 30° C.

[0086] In one embodiment the target pH may be e.g. pH between 4 and 5, preferably between pH 4.3 to 4.7, more preferably between pH 4.4 to 4.6, and even more preferably pH 4.45, pH 4.50, or pH 4.55.

[0087] Preferably, the composition according to the second aspect of the present invention comprises a texturing Lactococcus lactis lactic acid bacterium strain according to the present invention in combination with
[0088] (i) the lactic acid bacterium strain Lactococcus lactis subsp. cremoris DSM 25485, or a mutant or variant therefrom and/or
[0089] (ii) the lactic acid bacterium strain Lactococcus lactis subsp. lactis DSM 33192, or a mutant or variant therefrom and/or
[0090] (iii) the lactic acid bacterium strain Lactococcus lactis DSM 33133, or a mutant or variant therefrom.

[0091] The composition of the present invention may comprise further components, such as cryoprotectants, lyoprotectants, antioxidants, nutrients, fillers, flavorants or mixtures thereof, as described in detail below.

[0092] In a third aspect, the present invention relates to the use of the lactic acid bacterium strains (i) to (x) and/or the composition of the present invention for increasing the viscosity of a fermented milk product. The third aspect further relates to the use of the Lactococcus lactis subsp. cremoris strain DSM 25485 and/or the Lactococcus lactis subsp. lactis strain DSM 33192 for increasing viscosity (measured as shear stress with a shear rate of 300 s⁻¹, as described in the present invention) of a fermented milk product. The fermented milk product may be a mammalian-based fermented milk product (i.e., the milk base which is fermented has mammalian origin) or a plant-based fermented milk product (i.e., the milk base which is fermented is derived from plants, such as soy milk).

[0093] In a fourth aspect, the invention relates to a method of producing a food product comprising at least one stage in which at least one lactic acid bacterium strain as defined in the first aspect of the present invention, and/or the composition as defined in the second aspect of the present invention is used. Finally, the present invention relates to a food product comprising at least one lactic acid bacterium strain as defined in the first aspect of the present invention and/or the composition as defined in the second aspect of the present invention and/or strain DSM 33192. The food product may comprise further components, such as thickeners or stabilizers, or mixtures thereof, as described in detail below.

### BRIEF DESCRIPTION OF THE FIGURES

[0094] FIG. 1. Comparative analysis of eps gene clusters. A genetic comparison of a series of eps gene clusters of L. lactis available on the NCBI web-site and also those, which are the subject of this patent application, was performed, to assess the degree of similarity between different eps gene clusters. The analysis was based on fasta files containing the protein sequences encoded in eps gene clusters from 43 L. lactis strains. A subset of proteins (e.g. transposases) was excluded to ensure that the comparison was based only on functionally relevant proteins. The proteins were clustered using cd-hit (weizhongli-lab.org/cd-hit/) with an identity cutoff of 0.9, yielding 270 cd-hit groups from 712 protein sequences. A feature vector (length 270) was generated for each strain, based on presence or absence of proteins in each of the cd-hit groups. These feature vectors were used to compute the pairwise Jaccard similarities between all strains. The pairwise similarities were used to perform agglomerative hierarchical clustering. The clustering was done using the ‘single’ linkage method, as this results in a conservative clustering for assessing the novelty/uniqueness of the eps gene clusters, which are the subject of this patent application. With the ‘single’ linkage method, the height at which a cluster is connected with other clusters can be interpreted as the shortest distance (i.e. highest similarity) between any pair of strains in the two strain clusters.

[0095] FIG. 2. FIG. 2 depicts an overview of eps clusters of L. lactis of the invention. ORFs are annotated according to their proven or predicted functions, based on BLAST analysis on NCBI web-page against refseq protein database using default parameters. GT, glycosyltransferase; IS, transposase; hypot, hypothetical protein.

### BRIEF DESCRIPTION OF THE SEQUENCE LISTING

[0096] DSM 33134

[0097] SEQ ID NO:91 sets out the sets out the Lactococcus lactis strain DSM 33134 eps gene cluster,

[0098] complete sequence;

[0099] SEQ ID NO:1 sets out the open reading frame (ORF) of the epsR gene of DSM 33134;

[0100] SEQ ID NO:2 sets out the amino acid sequence encoded by SEQ ID NO:1;

[0101] SEQ ID NO:3 sets out the ORF of the epsX gene of DSM 33134;

[0102] SEQ ID NO:4 sets out the amino acid sequence encoded by SEQ ID NO:3;

[0103] SEQ ID NO:5 sets out the ORF of the epsB gene of DSM 33134;

[0104] SEQ ID NO:6 sets out the amino acid sequence encoded by SEQ ID NO:5;

[0105] SEQ ID NO:7 sets out the ORF of the epsD gene of DSM 33134

[0106] SEQ ID NO:8 sets out the amino acid sequence encoded by SEQ ID NO:7;

[0107] SEQ ID NO:9 sets out the ORF coding a putative GT1 protein of DSM 33134;

[0108] SEQ ID NO:10 sets out the amino acid sequence encoded by SEQ ID NO:9;

[0109] SEQ ID NO:11 sets out the ORF of a putative wzy gene of DSM 33134;

[0110] SEQ ID NO:12 sets out the amino acid sequence encoded by SEQ ID NO:11;

[0111] SEQ ID NO:13 sets out the ORF coding a putative GT2 protein of DSM 33134;

[0112] SEQ ID NO:14 sets out the amino acid sequence encoded by SEQ ID NO:13;

[0113] SEQ ID NO:15 sets out the ORF coding a putative GT3 protein of DSM 33134;

[0114] SEQ ID NO:16 sets out the amino acid sequence encoded by SEQ ID NO:15;

[0115] SEQ ID NO:17 sets out the ORF of a putative wzx gene of DSM 33134;

[0116] SEQ ID NO:18 sets out the amino acid sequence encoded by SEQ ID NO:17;

[0117] SEQ ID NO: 19 sets out the ORF of the epsL gene of DSM 33134;

[0118] SEQ ID NO:20 sets out the amino acid sequence encoded by SEQ ID NO:19;

[0119] SEQ ID NO:21 sets out the ORF coding a putative LytR family transcriptional regulator protein of DSM 33134;

[0120] SEQ ID NO:22 sets out the amino acid sequence encoded by SEQ ID NO:21;

[0121] SEQ ID NO:23 sets out the ORF coding a putative nucleotide sugar dehydrogenase protein of DSM 33134;

[0122] SEQ ID NO:24 sets out the amino acid sequence encoded by SEQ ID NO:23;

[0123] SEQ ID NO:25 sets out the ORF of the epsC gene of DSM 33134;

[0124] SEQ ID NO:26 sets out the amino acid sequence encoded by SEQ ID NO:25;

[0125] SEQ ID NO:27 sets out the ORF of the epsE gene of DSM 33134;

[0126] SEQ ID NO:28 sets out the amino acid sequence encoded by SEQ ID NO:27;

[0127] DSM 33136

[0128] SEQ ID NO:92 sets out the Lactococcus lactic strain DSM 33136 eps gene cluster, complete sequence;

[0129] SEQ ID NO:29 sets out the open reading frame (ORF) of the epsR gene of DSM 33136;

[0130] SEQ ID NO:30 sets out the amino acid sequence encoded by SEQ ID NO:29;

[0131] SEQ ID NO:31 sets out the ORF of the epsX gene of DSM 33136;

[0132] SEQ ID NO:32 sets out the amino acid sequence encoded by SEQ ID NO:31;

[0133] SEQ ID NO:33 sets out the ORF of the epsB gene of DSM 33136;

[0134] SEQ ID NO:34 sets out the amino acid sequence encoded by SEQ ID NO:33;

[0135] SEQ ID NO:35 sets out the ORF of the epsD gene of DSM 33136;

[0136] SEQ ID NO:36 sets out the amino acid sequence encoded by SEQ ID NO:35;

[0137] SEQ ID NO:37 sets out the ORF coding a putative GT1 protein of DSM 33136;

[0138] SEQ ID NO:38 sets out the amino acid sequence encoded by SEQ ID NO:37;

[0139] SEQ ID NO:39 sets out the ORF of a putative wzy gene of DSM 33136;

[0140] SEQ ID NO:40 sets out the amino acid sequence encoded by SEQ ID NO:39;

[0141] SEQ ID NO:41 sets out the ORF coding a putative GT2 protein of DSM 33136;

[0142] SEQ ID NO:42 sets out the amino acid sequence encoded by SEQ ID NO:41;

[0143] SEQ ID NO:43 sets out the ORF coding a putative GT3 protein of DSM 33136;

[0144] SEQ ID NO:44 sets out the amino acid sequence encoded by SEQ ID NO:43;

[0145] SEQ ID NO:45 sets out the ORF of a putative wzx gene of DSM 33136;

[0146] SEQ ID NO:46 sets out the amino acid sequence encoded by SEQ ID NO:45;

[0147] SEQ ID NO:47 sets out the ORF of the epsL gene of DSM 33136;

[0148] SEQ ID NO:48 sets out the amino acid sequence encoded by SEQ ID NO:47;

[0149] SEQ ID NO:49 sets out the ORF coding a putative LytR family transcriptional regulator protein of DSM 33136;

[0150] SEQ ID NO:50 sets out the amino acid sequence encoded by SEQ ID NO:49;

[0151] SEQ ID NO:51 sets out the ORF coding a putative polysaccharide pyruvyl transferase family protein of DSM 33136;

[0152] SEQ ID NO:52 sets out the amino acid sequence encoded by SEQ ID NO:51;

[0153] SEQ ID NO:53 sets out the ORF of the epsC gene of DSM 33136;

[0154] SEQ ID NO:54 sets out the amino acid sequence encoded by SEQ ID NO:53;

[0155] SEQ ID NO:55 sets out the ORF of the epsE gene of DSM 33136;

[0156] SEQ ID NO:56 sets out the amino acid sequence encoded by SEQ ID NO:55;

[0157] DSM 33139

[0158] SEQ ID NO:221 sets out the Lactococcus lactic strain DSM 33139 eps gene cluster, complete sequence;

[0159] SEQ ID NO:57 sets out the open reading frame (ORF) of the epsR gene of DSM 33139;

[0160] SEQ ID NO:58 sets out the amino acid sequence encoded by SEQ ID NO:57;

[0161] SEQ ID NO:59 sets out the ORF of the epsX gene of DSM 33139;

[0162] SEQ ID NO:60 sets out the amino acid sequence encoded by SEQ ID NO:59;

[0163] SEQ ID NO:61 sets out the ORF of the epsB gene of DSM 33139;

[0164] SEQ ID NO:62 sets out the amino acid sequence encoded by SEQ ID NO:61;

[0165] SEQ ID NO:63 sets out the ORF of the epsD gene of DSM 33139;

[0166] SEQ ID NO:64 sets out the amino acid sequence encoded by SEQ ID NO:63;

[0167] SEQ ID NO:65 sets out the ORF coding a putative GT1 protein of DSM 33139;

[0168] SEQ ID NO:66 sets out the amino acid sequence encoded by SEQ ID NO:65;

[0169] SEQ ID NO:67 sets out the ORF of a putative wzy gene of DSM 33139;

[0170] SEQ ID NO:68 sets out the amino acid sequence encoded by SEQ ID NO:67;

[0171] SEQ ID NO:69 sets out the ORF coding a putative GT2 protein of DSM 33139;

[0172] SEQ ID NO:70 sets out the amino acid sequence encoded by SEQ ID NO:69;

[0173] SEQ ID NO:71 sets out the ORF coding a putative GT3 protein of DSM 33139;

[0174] SEQ ID NO:72 sets out the amino acid sequence encoded by SEQ ID NO:71;

[0175] SEQ ID NO:73 sets out the ORF of a putative wzx gene of DSM 33139;

[0176] SEQ ID NO:74 sets out the amino acid sequence encoded by SEQ ID NO:73;

[0177] SEQ ID NO:75 sets out the ORF of the epsL gene of DSM 33139;

[0178] SEQ ID NO:76 sets out the amino acid sequence encoded by SEQ ID NO:75;

[0179] SEQ ID NO:77 sets out the ORF coding a putative LytR family transcriptional regulator protein of DSM 33139;

[0180] SEQ ID NO:78 sets out the amino acid sequence encoded by SEQ ID NO:77;

[0181] SEQ ID NO:79 sets out the ORF coding a putative nucleotide sugar dehydrogenase protein of DSM 33139;

[0182] SEQ ID NO:80 sets out the amino acid sequence encoded by SEQ ID NO:79;

[0183] SEQ ID NO:81 sets out the ORF of the epsC gene of DSM 33139;

[0184] SEQ ID NO:82 sets out the amino acid sequence encoded by SEQ ID NO:81;

[0185] SEQ ID NO:83 sets out the ORF of the epsE gene of DSM 33139;

[0186] SEQ ID NO:84 sets out the amino acid sequence encoded by SEQ ID NO:83;

[0187] SEQ ID NO:85 sets out the ORF coding a putative GT4 protein of DSM 33139;

[0188] SEQ ID NO:86 sets out the amino acid sequence encoded by SEQ ID NO:85;

[0189] SEQ ID NO:87 sets out the ORF coding a putative GT5 protein of DSM 33139;

[0190] SEQ ID NO:88 sets out the amino acid sequence encoded by SEQ ID NO:87;

[0191] SEQ ID NO:89 sets out the ORF coding a putative GT6 protein of DSM 33139;

[0192] SEQ ID NO:90 sets out the amino acid sequence encoded by SEQ ID NO:89;

[0193] SEQ ID NO:93 sets out the ORF coding a putative NAD-dependent epimerase/dehydratase family protein 1 of DSM 33139;

[0194] SEQ ID NO:94 sets out the amino acid sequence encoded by SEQ ID NO:93;

[0195] SEQ ID NO:95 sets out the ORF coding a putative glucose-1-phosphate thymidylyltransferase RfbA protein of DSM 33139;

[0196] SEQ ID NO:96 sets out the amino acid sequence encoded by SEQ ID NO:95;

[0197] SEQ ID NO:97 sets out the ORF coding a putative dTDP-glucose 4,6-dehydratase protein of DSM 33139;

[0198] SEQ ID NO:98 sets out the amino acid sequence encoded by SEQ ID NO:97;

[0199] SEQ ID NO:99 sets out the ORF coding a putative dTDP-4-dehydrorhamnose 3,5-epimerase protein of DSM 33139;

[0200] SEQ ID NO:100 sets out the amino acid sequence encoded by SEQ ID NO:99;

[0201] SEQ ID NO:101 sets out the ORF coding a putative NAD-dependent epimerase/dehydratase family protein 2 of DSM 33139;

[0202] SEQ ID NO:102 sets out the amino acid sequence encoded by SEQ ID NO:101;

[0203] SEQ ID NO:103 sets out the ORF coding a putative dTDP-4-dehydrorhamnose reductase protein of DSM 33139;

[0204] SEQ ID NO:104 sets out the amino acid sequence encoded by SEQ ID NO:103;

[0205] SEQ ID NO:105 sets out the ORF coding a putative nucleotidyl transferase protein of DSM 33139;

[0206] SEQ ID NO:106 sets out the amino acid sequence encoded by SEQ ID NO:105;

[0207] SEQ ID NO:107 sets out the ORF coding a putative acyltransferase 2 protein of DSM 33139;

[0208] SEQ ID NO:108 sets out the amino acid sequence encoded by SEQ ID NO:107;

[0209] SEQ ID NO:109 sets out the ORF coding a putative DUF1972 domain-containing protein of DSM 33139;

[0210] SEQ ID NO:110 sets out the amino acid sequence encoded by SEQ ID NO:109;

[0211] SEQ ID NO:111 sets out the ORF coding a putative acyltransferase 1 protein of DSM 33139;

[0212] SEQ ID NO:112 sets out the amino acid sequence encoded by SEQ ID NO:111;

[0213] DSM 33141

[0214] SEQ ID NO:222 sets out the Lactococcus lactic strain DSM 33141 eps gene cluster, complete sequence;

[0215] SEQ ID NO:113 sets out the open reading frame (ORF) of the epsR gene of DSM 33141;

[0216] SEQ ID NO:114 sets out the amino acid sequence encoded by SEQ ID NO:113;

[0217] SEQ ID NO:115 sets out the ORF of the epsX gene of DSM 33141;

[0218] SEQ ID NO:116 sets out the amino acid sequence encoded by SEQ ID NO:115;

[0219] SEQ ID NO:117 sets out the ORF of the epsB gene of DSM 33141;

[0220] SEQ ID NO:118 sets out the amino acid sequence encoded by SEQ ID NO:117;

[0221] SEQ ID NO:119 sets out the ORF of the epsD gene of DSM 33141

[0222] SEQ ID NO:120 sets out the amino acid sequence encoded by SEQ ID NO:119;

[0223] SEQ ID NO:121 sets out the ORF coding a putative GT1 protein of DSM 33141;

[0224] SEQ ID NO:122 sets out the amino acid sequence encoded by SEQ ID NO:121;

[0225] SEQ ID NO:123 sets out the ORF of a putative wzy gene of DSM 33141;

[0226] SEQ ID NO:124 sets out the amino acid sequence encoded by SEQ ID NO:123;

[0227] SEQ ID NO:125 sets out the ORF coding a putative GT2 protein of DSM 33141;

[0228] SEQ ID NO:126 sets out the amino acid sequence encoded by SEQ ID NO:125;

[0229] SEQ ID NO:127 sets out the ORF coding a putative GT3 protein of DSM 33141;

[0230] SEQ ID NO:128 sets out the amino acid sequence encoded by SEQ ID NO:127;

[0231] SEQ ID NO:129 sets out the ORF of a putative wzx gene of DSM 33141;

[0232] SEQ ID NO:130 sets out the amino acid sequence encoded by SEQ ID NO:129;

[0233] SEQ ID NO: 131 sets out the ORF of the epsL gene of DSM 33141;

[0234] SEQ ID NO:132 sets out the amino acid sequence encoded by SEQ ID NO:131;

[0235] SEQ ID NO:133 sets out the ORF coding a putative LytR family transcriptional regulator protein of DSM 33141;

[0236] SEQ ID NO:134 sets out the amino acid sequence encoded by SEQ ID NO:133;

[0237] SEQ ID NO:135 sets out the ORF coding a putative nucleotide sugar dehydrogenase protein of DSM 33141;

[0238] SEQ ID NO:136 sets out the amino acid sequence encoded by SEQ ID NO:135;

[0239] SEQ ID NO:137 sets out the ORF of the epsC gene of DSM 33141;

[0240] SEQ ID NO:138 sets out the amino acid sequence encoded by SEQ ID NO:137;

[0241] SEQ ID NO:139 sets out the ORF of the epsE1 gene of DSM 33141;

[0242] SEQ ID NO:140 sets out the amino acid sequence encoded by SEQ ID NO:139;

[0243] SEQ ID NO:141 sets out the ORF of the epsE2 gene of DSM 33141;

[0244] SEQ ID NO:142 sets out the amino acid sequence encoded by SEQ ID NO:141;

[0245] SEQ ID NO:143 sets out the ORF coding a putative GT4 protein of DSM 33141;

[0246] SEQ ID NO:144 sets out the amino acid sequence encoded by SEQ ID NO:143;

[0247] SEQ ID NO:145 sets out the ORF coding a putative GT5 protein of DSM 33141;

[0248] SEQ ID NO:146 sets out the amino acid sequence encoded by SEQ ID NO:145;

[0249] SEQ ID NO:147 sets out the ORF coding a putative GT6 protein of DSM 33141;

[0250] SEQ ID NO:148 sets out the amino acid sequence encoded by SEQ ID NO:147;

[0251] SEQ ID NO:149 sets out the ORF coding a putative acetyltransferase protein of DSM 33141;

[0252] SEQ ID NO:150 sets out the amino acid sequence encoded by SEQ ID NO:149;

[0253] SEQ ID NO:151 sets out the ORF coding a putative acyltransferase protein of DSM 33141;

[0254] SEQ ID NO:152 sets out the amino acid sequence encoded by SEQ ID NO:151;

[0255] DSM 33137

[0256] SEQ ID NO:223 sets out the Lactococcus lactic strain DSM 33137 eps gene cluster, complete sequence;

[0257] SEQ ID NO:153 sets out the open reading frame (ORF) of the epsR gene of DSM 33137;

[0258] SEQ ID NO:154 sets out the amino acid sequence encoded by SEQ ID NO:153;

[0259] SEQ ID NO:155 sets out the ORF of the epsX gene of DSM 33137;

[0260] SEQ ID NO:156 sets out the amino acid sequence encoded by SEQ ID NO:155;

[0261] SEQ ID NO:157 sets out the ORF of the epsB gene of DSM 33137;

[0262] SEQ ID NO:158 sets out the amino acid sequence encoded by SEQ ID NO:157;

[0263] SEQ ID NO:159 sets out the ORF of the epsD gene of DSM 33137;

[0264] SEQ ID NO:160 sets out the amino acid sequence encoded by SEQ ID NO:159;

[0265] SEQ ID NO:161 sets out the ORF coding a putative GT1 protein of DSM 33137;

[0266] SEQ ID NO:162 sets out the amino acid sequence encoded by SEQ ID NO:161;

[0267] SEQ ID NO:163 sets out the ORF of a putative wzy gene of DSM 33137;

[0268] SEQ ID NO:164 sets out the amino acid sequence encoded by SEQ ID NO:163;

[0269] SEQ ID NO:165 sets out the ORF coding a putative GT2 protein of DSM 33137;

[0270] SEQ ID NO:166 sets out the amino acid sequence encoded by SEQ ID NO:165;

[0271] SEQ ID NO:167 sets out the ORF coding a putative GT3 protein of DSM 33137;

[0272] SEQ ID NO:168 sets out the amino acid sequence encoded by SEQ ID NO:167;

[0273] SEQ ID NO:169 sets out the ORF of a putative wzx gene of DSM 33137;

[0274] SEQ ID NO:170 sets out the amino acid sequence encoded by SEQ ID NO:169;

[0275] SEQ ID NO:171 sets out the ORF of the epsL gene of DSM 33137;

[0276] SEQ ID NO:172 sets out the amino acid sequence encoded by SEQ ID NO:171;

[0277] SEQ ID NO:173 sets out the ORF coding a putative LytR family transcriptional regulator protein of DSM 33137;

[0278] SEQ ID NO:174 sets out the amino acid sequence encoded by SEQ ID NO:173;

[0279] SEQ ID NO:175 sets out the ORF coding a putative Core-2/I-Branching protein of DSM 33137;

[0280] SEQ ID NO:176 sets out the amino acid sequence encoded by SEQ ID NO:175;

[0281] SEQ ID NO:177 sets out the ORF of the epsC gene of DSM 33137;

[0282] SEQ ID NO:178 sets out the amino acid sequence encoded by SEQ ID NO:177;

[0283] SEQ ID NO:179 sets out the ORF of the epsE gene of DSM 33137;

[0284] SEQ ID NO:180 sets out the amino acid sequence encoded by SEQ ID NO:179;

[0285] SEQ ID NO:181 sets out the ORF coding a putative GT4 protein of DSM 33137;

[0286] SEQ ID NO:182 sets out the amino acid sequence encoded by SEQ ID NO:181;

[0287] DSM 33192

[0288] SEQ ID NO:183 sets out the Lactococcus lactic strain DSM 33192 eps gene cluster, complete sequence;

[0289] SEQ ID NO:184 sets out the amino acid sequence encoded by the epsR gene of DSM 33192 (nucleotides 1-318 of SEQ ID NO:183);

[0290] SEQ ID NO:185 sets out the amino acid sequence encoded by the epsX gene of DSM 33192 (nucleotides 407-826 of SEQ ID NO:183);

[0291] SEQ ID NO:186 sets out the amino acid sequence encoded by the epsC gene of DSM 33192 (nucleotides 993-1772 of SEQ ID NO:183);

[0292] SEQ ID NO:187 sets out the amino acid sequence encoded by the epsD gene of DSM 33192 (nucleotides 1782-2477 of SEQ ID NO:183);

[0293] SEQ ID NO:188 sets out the amino acid sequence encoded by the epsB gene of DSM 33192 (nucleotides 2532-3296 of SEQ ID NO:183);

[0294] SEQ ID NO:189 sets out the amino acid sequence encoded by the epsE gene of DSM 33192 (nucleotides 3318-3998 of SEQ ID NO:183);

[0295] SEQ ID NO:190 sets out the amino acid sequence of a putative glycosyltransferase (GT1) of DSM 33192, encoded by nucleotides 4008-4478 of SEQ ID NO:183;

[0296] SEQ ID NO:191 sets out the amino acid sequence of a putative glycosyltransferase (GT2) of DSM 33192, encoded by nucleotides 4478-4960 of SEQ ID NO:183;

[0297] SEQ ID NO:192 sets out the amino acid sequence of a putative glycosyltransferase (GT3) of DSM 33192, encoded by nucleotides 5015-5965 of SEQ ID NO:183;

[0298] SEQ ID NO:193 sets out the amino acid sequence of a putative glycosyltransferase (GT4) of DSM 33192, encoded by nucleotides 6026-6955 of SEQ ID NO:183;

[0299] SEQ ID NO:194 sets out the amino acid sequence encoded by the wzy gene of DSM 33192 (nucleotides 6955-8145 of SEQ ID NO:183);

[0300] SEQ ID NO:195 sets out the amino acid sequence of a glycerophosphotransferase family protein of DSM 33192, encoded by nucleotides 8132-9322 of SEQ ID NO:183;

[0301] SEQ ID NO:196 sets out the amino acid sequence encoded by the wzx gene of DSM 33192 (nucleotides 9309-10727 of SEQ ID NO:183);

[0302] SEQ ID NO:197 sets out the amino acid sequence encoded by the epsL gene of DSM 33192 (nucleotides 10825-11724 of SEQ ID NO:183);

[0303] SEQ ID NO:198 sets out the amino acid sequence of LytR protein of DSM 33192, encoded by nucleotides 11749-12651 of SEQ ID NO:183;

[0304] DSM 33135

[0305] SEQ ID NO:199 sets out the Lactococcus lactic strain DSM 33135 eps gene cluster, complete sequence;

[0306] SEQ ID NO:200 sets out the amino acid sequence encoded by the epsR gene of DSM 33135 (nucleotides 1-318 of SEQ ID NO:199);

[0307] SEQ ID NO:201 sets out the amino acid sequence encoded by the epsX gene of DSM 33135 (nucleotides 352-1119 of SEQ ID NO:199);

[0308] SEQ ID NO:202 sets out the amino acid sequence encoded by the epsC gene of DSM 33135 (nucleotides 1159 to 1938 of SEQ ID NO:199);

[0309] SEQ ID NO:203 sets out the amino acid sequence encoded by the epsD gene of DSM 33135 (nucleotides 1948-2640 of SEQ ID NO:199);

[0310] SEQ ID NO:204 sets out the amino acid sequence encoded by the epsB gene of DSM 33135 (nucleotides 2698 to 3462 of SEQ ID NO:199);

[0311] SEQ ID NO:205 sets out the amino acid sequence encoded by the epsE gene of DSM 33135 (nucleotides 3484-4170 of SEQ ID NO:199);

[0312] SEQ ID NO:206 sets out the amino acid sequence of a putative glycosyltransferase (GT1) of DSM 33135, encoded by nucleotides 4174-4824 of SEQ ID NO:199;

[0313] SEQ ID NO:207 sets out the amino acid sequence of a putative dTDP-glucose 4,6-dehydratase of DSM 33135, encoded by nucleotides 4784-5695 of SEQ ID NO:199;

[0314] SEQ ID NO:208 sets out the amino acid sequence of a putative dTDP-4-dehydrorhamnose reductase of DSM 33135, encoded by nucleotides 5717-6631 of SEQ ID NO:199;

[0315] SEQ ID NO:209 sets out the amino acid sequence of a putative dTDP-4-dehydrorhamnose 3,5-epimerase of DSM 33135, encoded by nucleotides 6586-7257 of SEQ ID NO:199;

[0316] SEQ ID NO:210 sets out the amino acid sequence of a putative glycosyltransferase (GT2) of DSM 33135 encoded by nucleotides 7276-8508 of SEQ ID NO:199;

[0317] SEQ ID NO:211 sets out the amino acid sequence of a putative DUF1919 protein of DSM 33135, encoded by nucleotides 8515-9144 of SEQ ID NO:199;

[0318] SEQ ID NO:212 sets out the amino acid sequence of a putative UDP-galactopyranose mutase protein of DSM 33135 encoded by nucleotides 9159-10274 of SEQ ID NO:199;

[0319] SEQ ID NO:213 sets out the amino acid sequence of a putative DUF4422 protein of DSM 33135 encoded by nucleotides 10271-11029 of SEQ ID NO:199;

[0320] SEQ ID NO:214 sets out the amino acid sequence of a putative glycosyltransferase (GT3) of DSM 33135, encoded by nucleotides 11042-12391 of SEQ ID NO:199;

[0321] SEQ ID NO:215 sets out the amino acid sequence of a putative glycosyltransferase (GT4) of DSM 33135, encoded by nucleotides 13008-13934 of SEQ ID NO:199;

[0322] SEQ ID NO:216 sets out the amino acid sequence encoded by the wzy gene of DSM 33135, (nucleotides 13939-15042 of SEQ ID NO:199);

[0323] SEQ ID NO:217 sets out the amino acid sequence of a putative glycosyltransferase (GT5) of DSM 33135, encoded by nucleotides 18528-19508 of SEQ ID NO:199;

[0324] SEQ ID NO:218 sets out the amino acid sequence of the lytR protein of DSM 33135, encoded by nucleotides 20389-21291 of SEQ ID NO:199;

[0325] SEQ ID NO:219 sets out the amino acid sequence encoded by the epsL gene of DSM 33135, (nucleotides 24053-24751 of the complementary strand of SEQ ID NO:199);

[0326] SEQ ID NO:220 sets out the amino acid sequence encoded by the wzx gene of DSM 33135, (nucleotides 26029-27444 of the complementary strand of SEQ ID NO:199);

[0327] DSM 33138

[0328] SEQ ID NO:224 sets out the Lactococcus lactic strain DSM 33138 eps gene cluster, complete sequence;

[0329] SEQ ID NO:225 sets out the amino acid sequence encoded by the epsR gene of DSM 33138 (nucleotides 1-318 of SEQ ID NO: 224);

[0330] SEQ ID NO:226 sets out the amino acid sequence encoded by the epsX gene of DSM 33138 (nucleotides 352-1119 of SEQ ID NO: 224);

[0331] SEQ ID NO:227 sets out the amino acid sequence encoded by the epsC gene of DSM 33138 (nucleotides 1159-1938 of SEQ ID NO: 224);

[0332] SEQ ID NO:228 sets out the amino acid sequence encoded by the epsD gene of DSM 33138 (nucleotides 1948-2640 of SEQ ID NO: 224);

[0333] SEQ ID NO:229 sets out the amino acid sequence encoded by the epsB gene of DSM 33138 (nucleotides 2698-3462 of SEQ ID NO: 224);

[0334] SEQ ID NO:230 sets out the amino acid sequence encoded by the epsE gene of DSM 33138 (nucleotides 3484-4170 of SEQ ID NO: 224);

[0335] SEQ ID NO:231 sets out the amino acid sequence of a putative glycosyltransferase (GT1) of DSM 33138, encoded by nucleotides 4174-4824 of SEQ ID NO: 224;

[0336] SEQ ID NO:232 sets out the amino acid sequence of a putative dTDP-glucose 4,6-dehydratase of DSM 33138, encoded by nucleotides 4784-5695 of SEQ ID NO: 224;

[0337] SEQ ID NO:233 sets out the amino acid sequence of a putative dTDP-4-dehydrorhamnose reductase of DSM 33138, encoded by nucleotides 5717-6631 of SEQ ID NO: 224;

[0338] SEQ ID NO:234 sets out the amino acid sequence of a putative dTDP-4-dehydrorhamnose 3,5-epimerase of DSM 33138, encoded by nucleotides 6586-7257 of SEQ ID NO: 224;

[0339] SEQ ID NO:235 sets out the amino acid sequence of a putative DUF1972 protein of DSM 33138, encoded by nucleotides 7276-8508 of SEQ ID NO: 224;

[0340] SEQ ID NO:236 sets out the amino acid sequence of a putative DUF1919 protein of DSM 33138, encoded by nucleotides 8515-9144 of SEQ ID NO: 224;

[0341] SEQ ID NO:237 sets out the amino acid sequence of a putative UDP-galactopyranose mutase protein of DSM 33138 encoded by nucleotides 9159-10274 of SEQ ID NO: 224;

[0342] SEQ ID NO:238 sets out the amino acid sequence of a putative DUF4422 protein of DSM 33138 encoded by nucleotides 10271-11029 of SEQ ID NO: 224;

[0343] SEQ ID NO:239 sets out the amino acid sequence of a putative glycosyltransferase (GT2) of DSM 33138, encoded by nucleotides 11042-12391 of SEQ ID NO: 224;

[0344] SEQ ID NO:240 sets out the amino acid sequence of a putative glycosyltransferase (GT3) of DSM 33138, encoded by nucleotides 13008-13934 of SEQ ID NO: 224;

[0345] SEQ ID NO:241 sets out the amino acid sequence encoded by the wzy gene of DSM 33138, (nucleotides 13939-15042 of SEQ ID NO: 224);

[0346] SEQ ID NO:242 sets out the amino acid sequence of a putative glycosyltransferase (GT4) of DSM 33138, encoded by nucleotides 18527-19507 of SEQ ID NO: 224;

[0347] SEQ ID NO:243 sets out the amino acid sequence of the lytR protein of DSM 33138, encoded by nucleotides 20388-21290 of SEQ ID NO: 224;

[0348] DSM 33140

[0349] SEQ ID NO:244 sets out the Lactococcus lactic strain DSM 33140 eps gene cluster, complete sequence;

[0350] SEQ ID NO:245 sets out the amino acid sequence encoded by the epsR gene of DSM 33140 (nucleotides 1-318 of SEQ ID NO: 244);

[0351] SEQ ID NO:246 sets out the amino acid sequence encoded by the epsX gene of DSM 33140 (nucleotides 352-1119 of SEQ ID NO: 244);

[0352] SEQ ID NO:247 sets out the amino acid sequence encoded by the epsC gene of DSM 33140 (nucleotides 1159-1938 of SEQ ID NO: 244);

[0353] SEQ ID NO:248 sets out the amino acid sequence encoded by the epsD gene of DSM 33140 (nucleotides 1948-2643 of SEQ ID NO: 244);

[0354] SEQ ID NO:249 sets out the amino acid sequence encoded by the epsB gene of DSM 33140 (nucleotides 2698-3462 of SEQ ID NO: 244);

[0355] SEQ ID NO:250 sets out the amino acid sequence encoded by the epsE gene of DSM 33140 (nucleotides 3484-4164 of SEQ ID NO: 244);

[0356] SEQ ID NO:251 sets out the amino acid sequence of a putative UDP-N-acetylglucosamine-LPS N-acetylglucosamine protein of DSM 33140, encoded by nucleotides 4168-4617 of SEQ ID NO: 244;

[0357] SEQ ID NO:252 sets out the amino acid sequence of a putative glycosyltransferase (GT1) of DSM 33140, encoded by nucleotides 4617-5123 of SEQ ID NO: 244;

[0358] SEQ ID NO:253 sets out the amino acid sequence of a putative glycosyltransferase (GT2) of DSM 33140, encoded by nucleotides 5120-5827 of SEQ ID NO: 244;

[0359] SEQ ID NO:254 sets out the amino acid sequence encoded by the gene wzy of DSM 33140 (nucleotides 5833-6927 of SEQ ID NO: 244);

[0360] SEQ ID NO:255 sets out the amino acid sequence encoded by the epsL gene of DSM 33140, (nucleotides 8438-9340 of SEQ ID NO: 244);

[0361] SEQ ID NO:256 sets out the amino acid sequence of the lytR protein of DSM 33140, encoded by nucleotides 9365-10267 of the complementary strand of SEQ ID NO: 244;

[0362] DSM 33142

[0363] SEQ ID NO:257 sets out the Lactococcus lactic strain DSM 33142 eps gene cluster, complete sequence;

[0364] SEQ ID NO:258 sets out the amino acid sequence encoded by the epsR gene of DSM 33142 (nucleotides 1-318 of SEQ ID NO: 257);

[0365] SEQ ID NO:259 sets out the amino acid sequence encoded by the epsX gene of DSM 33142 (nucleotides 407-1120 of SEQ ID NO: 257);

[0366] SEQ ID NO:260 sets out the amino acid sequence encoded by the epsC gene of DSM 33142 (nucleotides 1160-1939 of SEQ ID NO: 257);

[0367] SEQ ID NO:261 sets out the amino acid sequence encoded by the epsD gene of DSM 33142 (nucleotides 1949-2644 of SEQ ID NO: 257);

[0368] SEQ ID NO:262 sets out the amino acid sequence encoded by the epsB gene of DSM 33142 (nucleotides 2699-3463 of SEQ ID NO: 257);

[0369] SEQ ID NO:263 sets out the amino acid sequence encoded by the epsE1 gene of DSM 33142 (nucleotides 3485-4084 of SEQ ID NO: 257);

[0370] SEQ ID NO:264 sets out the amino acid sequence encoded by the epsE2 gene of DSM 33142 (nucleotides 4085-4840 of SEQ ID NO: 257);

[0371] SEQ ID NO:265 sets out the amino acid sequence of lytR protein of DSM 33142, encoded by nucleotides 5876-6778 of SEQ ID NO: 257;

[0372] SEQ ID NO:266 sets out the amino acid sequence encoded by the epsL gene of DSM 33142, encoded by nucleotides 6803-7717 of the complementary strand of SEQ ID NO: 257;

[0373] SEQ ID NO:267 sets out the amino acid sequence of a putative nucleotide sugar dehydrogenase protein of DSM 33142, encoded by nucleotides 7727-8173 of the complementary strand of SEQ ID NO: 257;

[0374] SEQ ID NO:268 sets out the amino acid sequence of a putative glycosyltransferase (GT1) of DSM 33142, encoded by nucleotides 9726-10673 of the complementary strand of SEQ ID NO: 257;

[0375] SEQ ID NO:269 sets out the amino acid sequence of a putative acetyltransferase of DSM 33142, encoded by nucleotides 10657-11211 of the complementary strand of SEQ ID NO: 257;

[0376] SEQ ID NO:270 sets out the amino acid sequence encoded by the wzy gene of DSM 33142, (nucleotides 11201-12349 of the complementary strand of SEQ ID NO: 257);

[0377] SEQ ID NO:271 sets out the amino acid sequence of a putative glycosyltransferase (GT2) of DSM 33142, encoded by nucleotides 12336-13421 of the complementary strand of SEQ ID NO: 257;

[0378] SEQ ID NO:272 sets out the amino acid sequence of a putative glycosyltransferase (GT3) of DSM 33142, encoded by nucleotides 13418-14260 of the complementary strand of SEQ ID NO: 257;

[0379] SEQ ID NO:273 sets out the amino acid sequence encoded by the wzx gene of the complementary strand of DSM 33142, (nucleotides 15538-16953 of SEQ ID NO: 257);

[0380] DSM 33183

[0381] SEQ ID NO:274 sets out the Lactococcus lactic strain DSM 33183 eps gene cluster, complete sequence;

[0382] SEQ ID NO:275 sets out the amino acid sequence encoded by the epsR gene of DSM 33183 (nucleotides 1-318 of SEQ ID NO: 274);

[0383] SEQ ID NO:276 sets out the amino acid sequence encoded by the epsC gene of DSM 33183 (nucleotides 681-1460 of SEQ ID NO: 274);

[0384] SEQ ID NO:277 sets out the amino acid sequence encoded by the epsD gene of DSM 33183 (nucleotides 1470-2165 of SEQ ID NO: 274);

[0385] SEQ ID NO:278 sets out the amino acid sequence encoded by the epsB gene of DSM 33183 (nucleotides 2220-3005 of SEQ ID NO: 274);

[0386] SEQ ID NO:279 sets out the amino acid sequence encoded by the epsE1 gene of DSM 33183 (nucleotides 2992-3591 of SEQ ID NO: 274);

[0387] SEQ ID NO:280 sets out the amino acid sequence encoded by the epsE2 gene of DSM 33183 (nucleotides 3592-4347 of SEQ ID NO: 274);

[0388] SEQ ID NO:281 sets out the amino acid sequence of lytR protein of DSM 33183, encoded by nucleotides 5383-6285 of SEQ ID NO: 274);

[0389] SEQ ID NO:282 sets out the amino acid sequence encoded by the epsL gene of DSM 33183, encoded by nucleotides 6310-7224 of the complementary strand of SEQ ID NO: 274);

[0390] SEQ ID NO:283 sets out the amino acid sequence of a putative nucleotide sugar dehydrogenase protein of DSM 33183, encoded by nucleotides 7234-7680 of the complementary strand of SEQ ID NO: 274;

[0391] SEQ ID NO:284 sets out the amino acid sequence of a putative glycosyltransferase (GT1) of DSM 33183 encoded by nucleotides 9232-10179 of the complementary strand of SEQ ID NO: 274;

[0392] SEQ ID NO:285 sets out the amino acid sequence of a putative acetyltransferase of DSM 33183, encoded by nucleotides 10163-10717 of the complementary strand of SEQ ID NO: 274;

[0393] SEQ ID NO:286 sets out the amino acid sequence encoded by the wzy gene of DSM 33183, (nucleotides 10707-11846 of the complementary strand of SEQ ID NO: 274);

[0394] SEQ ID NO:287 sets out the amino acid sequence of a putative glycosyltransferase (GT2) of DSM 33183, encoded by nucleotides 11833-12918 of the complementary strand of SEQ ID NO: 274;

[0395] SEQ ID NO:288 sets out the amino acid sequence of a putative glycosyltransferase (GT3) of DSM 33183, encoded by nucleotides 12915-13757 of the complementary strand of SEQ ID NO: 274;

[0396] SEQ ID NO:289 sets out the amino acid sequence encoded by the wzx gene of DSM 33183, (nucleotides 15037-16476 of the complementary strand of SEQ ID NO: 274).

[0397] SEQ ID NO:290 sets out the Lactococcus lactis strain DSM 33133 eps gene cluster, complete sequence.

[0398] SEQ ID NO:291 sets out the Lactococcus lactis strains DSM 33204, 33205, 33220, 33221, 33218, 33219, 33224, 33197, 33196, 33195, 33194, 33226, 33223, 33193 and 33192 eps gene clusters, complete sequence.

[0399] SEQ ID NO:292 sets out the Lactococcus lactis strains DSM 33200, 33201, 33202 and 33203 eps gene clusters, complete sequence.

[0400] SEQ ID NO:293 sets out the Lactococcus lactis strain DSM 33222 eps gene cluster, complete sequence.

[0401] SEQ ID NO:294 sets out the Lactococcus lactis strain DSM 33225 eps gene cluster, complete sequence.

### DETAILED DESCRIPTION

### Definitions

[0402] All definitions of herein relevant terms are in accordance of what would be understood by the skilled person in relation to the herein relevant technical context.

[0403] In the context of the present invention in any of its embodiments, the expression “lactic acid bacteria” (“LAB”) designates food-grade bacteria producing lactic acid as the major metabolic end-product of carbohydrate fermentation. These bacteria are related by their common metabolic and physiological characteristics and are usually Gram positive, low-GC, acid tolerant, non-sporulating, non-respiring, rod-shaped bacilli or cocci. During the fermentation stage, the consumption of carbohydrate by these bacteria causes the formation of lactic acid, reducing the pH and leading to the formation of a protein coagulum. These bacteria are thus responsible for the acidification of milk and for the texture of the dairy product. The industrially most useful lactic acid bacteria are found within the order “Lactobacillales” which includes Lactococcus spp., Streptococcus spp., Lactobacillus spp., Leuconostoc spp., Pediococcus spp. and Propionibacterium spp. These are frequently used as food cultures alone or in combination with other lactic acid bacteria.

[0404] By “texturing strain” in the present specification and claims is meant a strain which preferably generates fermented mammalian milks having, under the conditions described below and as exemplified in Example 1 herein, a shear stress preferably greater than 40 Pa measured at shear rate 300 s⁻¹. A strain of Lactococcus lactic can be defined as strongly texturing in that it generates fermented milks having, under the same conditions, a shear stress greater than 50 Pa measured at shear rate 300 s⁻¹. 200 ml semi-fat milk (1.5% fat) is heated to 90° C. for 20 min, followed by cooling to inoculation temperature, and inoculated with 2 ml of an overnight culture of the lactic acid bacterium strain, and left at inoculation temperature until pH 4.55 followed by storage at 4° C. until shear stress is measured, typically from 1-7 days, such as for 5 days, followed by gently stirring and measuring the shear stress at shear rate 300 s⁻¹ wherein the inoculation temperature is 30° C.

[0405] In addition, by “texturing strain” in the present specification and claims is meant a strain which preferably generates fermented plant-based milks having, under the conditions described below and as exemplified in Example 2 herein, a shear stress of 24 Pa or more, preferably 30 Pa or more, or even more preferably 42 Pa or more than measured at shear rate 300 s⁻¹. A strain of Lactococcus lactic can be defined as strongly texturing in that it generates fermented milks having, under the same conditions, a shear stress of 30 Pa or more measured at shear rate 300 s⁻¹. 1% volume overnight microbial culture (obtained by inoculating the microbial culture in M17 broth supplemented with 2% glucose at 30° C.) is inoculated in soy milk with glucose, such as 0.5-5% glucose, preferably 0.5-2% glucose, more preferably about 2% glucose, as described in Example 2. The inoculation takes place at 30° C. in 200-ml scale until target pH has been reached e.g. pH between 4 and 5, preferably between pH 4.3 to 4.7, more preferably between pH 4.4 to 4.6, and even more preferably pH 4.45, pH 4.50, or pH 4.55 followed by cooling to 4° C. and storage at 4° C. until shear stress is measured, typically from 1-7 days, such as for 5 days, followed by gently stirring and measuring the shear stress at shear rate 300 s⁻¹ wherein the inoculation temperature is 30° C.

[0406] The texturing lactic acid bacterium strain of the invention may be an isolated strain, e.g., isolated from a naturally occurring source, or may be a non-naturally occurring strain, e.g., obtained recombinantly. Recombinant strains will differ from naturally occurring strains by at least the presence of the nucleic acid construct(s) used to transform or transfect the mother strain.

[0407] The term “sequence identity” relates to the relatedness between two nucleotide sequences or between two amino acid sequences. For purposes of the present invention, the degree of sequence identity between two nucleotide sequences or two amino acid sequences is determined using multiple sequence alignment tool Clustal Omega (www.ebi.ac.uk/Tools/msa/clustalo/; Sievers, F. et al., 2011, “Fast, scalable generation of high-quality protein multiple sequence alignments using Clustal Omega”, Mol. Syst. Biol., 7:539) with standard parameters.

[0408] In the present context, the terms “strains derived from”, “derived strain” or “mutant” should be understood as a strain derived from a strain of the invention by means of, e.g., genetic engineering, radiation and/or chemical treatment, and/or selection, adaptation, screening, etc. It is preferred that the derived strain is a functionally equivalent mutant, e.g., a strain that has substantially the same, or improved, properties with respect to texturing capacity as the mother strain. Such a derived strain is a part of the present invention. Especially, the term “derived strain” or “mutant” refers to a strain obtained by subjecting a strain of the invention to any conventionally used mutagenesis treatment including treatment with a chemical mutagen such as ethane methane sulphonate (EMS) or N-methyl-N′-nitro-N-nitroguanidine (NTG), UV light or to a spontaneously occurring mutant. A mutant may have been subjected to several mutagenesis treatments (a single treatment should be understood one mutagenesis step followed by a screening/selection step), but it is presently preferred that no more than 20, no more than 10, or no more than 5, treatments are carried out. In a presently preferred derived strain, less than 1%, or less than 0.1%, less than 0.01%, less than 0.001% or even less than 0.0001% of the nucleotides in the bacterial genome have been changed (such as by replacement, insertion, deletion or a combination thereof) compared to the mother strain.

[0409] The term “thermophilic” herein refers to microorganisms that thrive best at temperatures above 35° C. The industrially most useful thermophilic bacteria include Streptococcus spp. and Lactobacillus spp. The term “thermophilic fermentation” herein refers to fermentation at a temperature above about 35° C., such as between about 35° C. to about 45° C. The term “thermophilic fermented milk product” refers to fermented milk products prepared by thermophilic fermentation of a thermophilic starter culture and include such fermented milk products as set-yoghurt, stirred-yoghurt and drinking yoghurt, e.g., Yakult. In addition, the term “thermophilic fermented milk product” refers to fermented milk products prepared by thermophilic fermentation of a thermophilic starter culture in a plant-based milk base, such as soy milk or soy milk supplemented with sugar such as e.g. fructose, sucrose, High Fructose Corn Syrup (HFCS), honey, glucose, invert sugar, maltose, galactose, lactose, or any combination thereof. The concentration of sugar may be between 0.5% to 5%, from 0.5 to 2%, 0.5%, 1%, 1.5%, or 2% such as e.g. 0.5-5% glucose, preferably 0.5-2% glucose, more preferably about 2% glucose.

[0410] The term “mesophilic” herein refers to microorganisms that thrive best at moderate temperatures (15° C.-35° C.). The industrially most useful mesophilic bacteria include Lactococcus spp. and Leuconostoc spp. The term “mesophilic fermentation” herein refers to fermentation at a temperature between about 22° C. and about 35° C. The term “mesophilic food products” refers to food products prepared by mesophilic fermentation of a mesophilic starter culture. The term “mesophilic fermented milk product” refers to fermented milk products prepared by mesophilic fermentation of a mesophilic starter culture and include such fermented milk products as buttermilk, sour milk, cultured milk, smetana, sour cream, Kefir and fresh cheese, such as quark, tvarog and cream cheese. In addition, the term “mesophilic fermented milk product” refers to fermented milk products prepared by mesophilic fermentation of a mesophilic starter culture in a plant-based milk base, such as soy milk or soy milk supplemented with sugar such as e.g. fructose, sucrose, High Fructose Corn Syrup (HFCS), honey, glucose, invert sugar, maltose, galactose, lactose, or any combination thereof. The concentration of sugar may be between 0.5% to 5%, from 0.5 to 2%, 0.5%, 1%, 1.5%, or 2% such as e.g. 0.5-5% glucose, preferably 0.5-2% glucose, more preferably about 2% glucose.

[0411] The term “mesophilic starter culture” herein refers to any starter cultures culture containing at least one mesophilic bacterium strain. Mesophilic starter cultures, such as combinations of Lactococcus lactis subsp lactis strains and Lactococcus lactis subsp. cremoris strains, are used to produce fermented milk products, such as fresh cheese, butter milk, sour milk and sour cream.

[0412] The terms “fermented milk” and “dairy” are used interchangeably herein. In the context of the present invention in any of its embodiments, the expression “fermented milk product” means a food or feed product wherein the preparation of the food or feed product involves fermentation of a milk base with a lactic acid bacterium. “Fermented milk product” as used herein includes but is not limited to products such as thermophilic fermented milk products or mesophilic fermented milk products, as defined above. In addition, as described above, “fermented milk product” as used herein includes products prepared by fermentation of plant-based milk bases, such as soy milk or soy milk supplemented with sugar such as e.g. fructose, sucrose, High Fructose Corn Syrup (HFCS), honey, glucose, invert sugar, maltose, galactose, lactose, or any combination thereof. The concentration of sugar may be between 0.5% to 5%, from 0.5 to 2%, 0.5%, 1%, 1.5%, or 2% such as e.g. 0.5-5% glucose, preferably 0.5-2% glucose, more preferably about 2% glucose. Hence, “fermented milk product” according to the present invention encompass fermented mammalian milk products (i.e., the milk base has mammalian origin) and fermented plant-milk product (i.e., the milk base is a plant-derived milk base, such as soy milk base).

[0413] In the context of the present application, the term “milk” is broadly used in its common meaning to refer to liquids produced by the mammary glands of animals (e.g., cows, sheep, goats, buffaloes, camel, etc.) or derived from plants. The term “milk base” or “milk substrate” may be any milk material that can be subjected to fermentation according to the present invention. Thus, useful milk bases include, but are not limited to, solutions/-suspensions of any milk or milk like products comprising protein, such as whole or low-fat milk, skim milk, buttermilk, reconstituted milk powder, condensed milk, dried milk, whey, whey permeate, lactose, mother liquid from crystallization of lactose, whey protein concentrate, cream or plant-based milks. Obviously, the milk base may originate from any mammalian, e.g., being substantially pure mammalian milk, or reconstituted milk powder. Plant sources of milk include, but are not limited to, milk extracted from soy bean. Preferably, the plant-based milk is soy milk, which can be preferably supplemented with sugar such as e.g. fructose, sucrose, High Fructose Corn Syrup (HFCS), honey, glucose, invert sugar, maltose, galactose, lactose, or any combination thereof. The concentration of sugar may be between 0.5% to 5%, from 0.5 to 2%, 0.5%, 1%, 1.5%, or 2% such as e.g. 0.5-5% glucose, preferably 0.5-2% glucose, more preferably about 2% glucose.

[0414] Prior to fermentation, the milk base may be homogenized and pasteurized according to methods known in the art. “Homogenizing” as used in the context of the present invention in any of its embodiments, means intensive mixing to obtain a soluble suspension or emulsion. If homogenization is performed prior to fermentation, it may be performed so as to break up the milk fat into smaller sizes so that it no longer separates from the milk. This may be accomplished by forcing the milk at high pressure through small orifices.

[0415] “Pasteurizing” as used in the context of the present invention in any of its embodiments, means treatment of the milk base to reduce or eliminate the presence of live organisms, such as microorganisms. Preferably, pasteurization is attained by maintaining a specified temperature for a specified period of time. The specified temperature is usually attained by heating. The temperature and duration may be selected in order to kill or inactivate certain bacteria, such as harmful bacteria. A rapid cooling step may follow. For instance, milk base may be heat treated at 92° C. for 3 min, cooled to 38° C. and then inoculated as described in step i. of the process of the present invention.

[0416] As used herein, the term “about” (or “around”) means the indicated value±1% of its value, or the term “about” means the indicated value±2% of its value, or the term “about” means the indicated value±5% of its value, the term “about” means the indicated value±10% of its value, or the term “about” means the indicated value±20% of its value, or the term “about” means the indicated value±30% of its value; preferably the term “about” means exactly the indicated value (±0%).

[0417] Throughout the description and claims the word “comprise” and variations of the word (e.g., “comprising”, “having”, “including”, “containing”) typically is not limiting and thus does not exclude other features, which may be for example technical features, additives, components, or steps. However, whenever the word “comprise” is used herein, this also includes a special embodiment in which this word is understood as limiting; in this particular embodiment the word “comprise” has the meaning of the term “consist of”.

[0418] The use of the terms “a” and “an” and “the” and similar referents in the context of describing the invention (especially in the context of the following claims) are to be construed to cover both the singular and the plural, unless otherwise indicated herein or clearly contradicted by context. Recitation of ranges of values herein are merely intended to serve as a shorthand method of referring individually to each separate value falling within the range, unless otherwise indicated herein, and each separate value is incorporated into the specification as if it were individually recited herein. All methods described herein can be performed in any suitable order unless otherwise indicated herein or otherwise clearly contradicted by context. The use of any and all examples, or exemplary language (e.g., “such as”) provided herein, is intended merely to better illuminate the invention and does not pose a limitation on the scope of the invention unless otherwise claimed. No language in the specification should be construed as indicating any non-claimed element as essential to the practice of the invention.

[0419] Texture is an important quality factor for fermented milk products such as yoghurt, and consumer acceptance is often closely linked to texture properties. The texture of fermented milk is dependent on both the bacteria used for fermentation and process parameters. Polysaccharide-producing bacteria can positively influence product characteristics such as texture and sensory properties. Sensory textural attributes are often correlated with the results from instrumental text, e.g., shear stress is related to viscosity and perceived mouth thickness (Poulsen et al., 2019). In the context of the present invention, the rheological properties (texture) of a fermented milk product, such as viscosity, can be measured as a function of the shear stress of the fermented milk product, as described below.

[0420] In connection with the present invention, shear stress may be measured by the following method: When the pH of the fermented milk (e.g., mammalian- or plant-based milk) reached pH^{˜}4.55, the fermented milk product was brought to 4° C. and manually stirred gently by means of a stick fitted with a perforated disc until homogeneity of the sample. The rheological properties of the sample were assessed on a rheometer (Anton Paar Physica Rheometer with ASC, Automatic Sample Changer, Anton Paar® GmbH, Austria) by using a bob-cup. The rheometer was set to a constant temperature of 13° C. during the time of measurement. Settings were as follows:
[0421] Holding time (to rebuild to somewhat original structure)
[0422] 5 minutes without any physical stress (oscillation or rotation) applied to the sample.
[0423] Oscillation step (to measure the elastic and viscous modulus, G′ and G″, respectively, therefore calculating the complex modulus G*)
   [0424] Constant strain=0.3%, frequency (f)=[0.5 . . . 8] Hz
   [0425] 6 measuring points over 60 s (one every 10 s)
[0426] Rotation step (to measure shear stress at 300 1/s)
[0427] Two steps were designed:
[0428] Shear rate=[0.3−300] 1/s and 2) Shear rate=[275−0.3] 1/s.

[0429] Each step contained 21 measuring points over 210 s (on every 10 s). The shear stress at 300 1/s (300 s⁻¹) was chosen for further analysis, as this correlates to mouth thickness when swallowing a fermented milk product.

[0430] Preferably, the shear stress may be measured by the following method: Shear stress data were obtained by inoculating the same microbial cultures in semi-fat milk (1.5% fat); milk was heated at 90° C. for 20 min and cooled down to the inoculation temperature (30° C.), prior to inoculation with 1% overnight microbial culture. The inoculation took place for 8-22 h at 30° C. in 200-ml scale until pH^{˜}4.55 followed by cooling to 4° C. and storage at 4° C. until shear stress was measured, typically from 1-7 days, such as for 5 days. After the storage, the fermented milk was stirred gently by means of a stick fitted with a bored disc until homogeneity of the sample. Shear stress of the samples was assessed on a rheometer (Anton Paar Physica Rheometer with ASC, Automatic Sample Changer, Anton Paar® GmbH, Austria) using the following settings:
[0431] Wait time (to rebuild to somewhat original structure)
[0432] 5 minutes without oscillation or rotation
[0433] Rotation (to measure shear stress at 300 s⁻¹ etc.)
[0434] Y′=[0.2707−300] s⁻¹ and y′=[275−0.2707] s⁻¹

[0435] 21 measuring points over 210 s (on every 10 s) going up to 300 s⁻¹ and 21 measuring points over 210 s (one every 10 s) going down to 0.2707 s⁻¹. For the data analysis, the shear stress at shear rate 300 s⁻¹ was chosen.

[0436] Alternatively, the shear stress is measured by the following method: 1% volume overnight microbial culture (obtained by inoculating the microbial culture in M17 broth supplemented with 2% glucose at 30° C.) is inoculated in soy milk with glucose, such as 0.5-5% glucose, preferably 0.5-2% glucose, more preferably about 2% glucose. The inoculation takes place at 30° C. in 200-ml scale until target pH, followed by cooling to 4° C. and storage at 4° C. until shear stress is measured, typically from 1-7 days, such as for 5 days. Target pH may be e.g. pH between 4 and 5, preferably between pH 4.3 to 4.7, more preferably between pH 4.4 to 4.6, and even more preferably pH 4.45, pH 4.50, or pH 4.55. After the storage, the fermented milk is stirred gently by means of a stick fitted with a bored disc until homogeneity of the sample. Shear stress is assessed on a rheometer (Anton Paar Physica Rheometer with ASC, Automatic Sample Changer, Anton Paar® GmbH, Austria) using the following settings:
[0437] Wait time (to rebuild to somewhat original structure)
[0438] 5 minutes without oscillation or rotation
[0439] Rotation (to measure shear stress at 300 s⁻¹ etc.)
[0440] Y′=[0.2707−300] s⁻¹ and y′=[275−0.2707] s⁻¹

[0441] 21 measuring points over 210 s (on every 10 s) going up to 300 s⁻¹ and 21 measuring points over 210 s (one every 10 s) going down to 0.2707 s⁻¹. For the data analysis, the shear stress at shear rate 300 s⁻¹ may be chosen.

[0442] The Lactococcus lactis Subsp. Lactis Lactic Acid Bacterium (LAB) Strains

[0443] It is an object of the present invention to provide texturing LAB strains suitable for use in preparation of food products. In particular, it is an object of the present invention to provide texturing Lactococcus lactis strains suitable for use in preparation of mesophilic food products. This object has been solved with the Lactococcus lactis strains comprising novel eps gene clusters, as described herein. As discussed in the examples (see, e.g., Tables 1 and 2 and Examples 1 and 2), the disclosed Lactococcus lactis strains DSM 33134, DSM 33135, DSM 33136, DSM 33137, DSM 33138, DSM 33139, DSM 33140, DSM 33141, DSM 33142, DSM 33183, DSM 25485 and DSM 33192 have excellent texturing properties.

[0444] The present inventors analyzed the eps gene cluster of the above strains and identified novel gene sequences which are believed to be involved in the production of exopolysaccharide (EPS), and thereby involved in the creation of the excellent texturing properties of the above Lactococcus lactis strains for fermenting milk.

[0445] Without being limited to theory, there is no substantial reason to believe that it would not be plausible that another Lactococcus lactis strain (i.e., different from the specific strains of the invention) that comprises eps gene cluster genes/sequences similar to the novel herein discussed characterizing eps gene cluster genes/sequences of the strains of the invention, would not also have improved texturing properties. In LAB, the Wzy-dependent pathway is the pathway of choice for the synthesis of heteropolymeric EPS.

[0446] The genetic loci for polysaccharide biosynthesis by the Wzy-dependent mechanism are similar in all bacteria and are well studied in Streptococcus pneumoniae. Of note, S. pneumoniae produces only capsular exocellular polysaccharides (often abbreviated as CPS), while LAB can produce both CPS and EPS (EPS stands for “exocellular polysaccharide”, which is excreted into the medium/milk). The same gene cluster is responsible for the production of CPS and EPS. Genetic analysis of the CPS locus from 90 pneumococcal serotypes demonstrated a striking feature of the polysaccharide operon: the presence of many highly divergent forms of each of the key enzyme classes. Thus, there were found 40 homology groups for polysaccharide polymerases, 13 groups of lipases, and a great diversity of glycosyltransferases. The presence of multiple non-homologous or highly divergent forms of these enzymes, together with often different G+C content of the region in which these are encoded, supports the view that these genes have been imported on multiple occasions from different and unknown sources. Many eps gene clusters have undergone rearrangement mediated by insertion sequence (IS) elements and received genes from other organisms by a horizontal gene transfer. Typical of eps operon organization is the presence of IS elements flanking or within the operon. The plethora of glycosyltransferases observed in the loci for polysaccharide production provides an opportunity to continually generate new strains producing unique EPS by gene shuffling. As EPS show an enormous diversity in monosaccharide building blocks, anomeric configuration, conformation, and stereochemistry, the resulting diversity of EPS structures is uncanny: for instance, two glucose residues can be joined together in 30 different ways. According to Carbohydrate-Active enZymes (CAZy) database (cazy.org), glycosyltransferases are currently classified into 107 families (June 2019, www.cazy.org/GlycosylTransferases.html), which can help in predicting their mode of action. Nevertheless, this does not mean that all enzymes of a family recognize the same donor and acceptor, as polyspecificity is common among glycosyltransferase families, and thus one should be prudent with the over-interpretation of predictions based purely on this classification.

[0447] Genes encoding Wzy-dependent exocellular polysaccharide biosynthesis proteins in LAB are typically organized in a cluster with an operon structure and are generally chromosomal in Streptococcus thermophilus, but can reside on a plasmid or the chromosome in L. lactic and Lactobacillus sp. Generally, eps gene clusters are highly diverse, and their nucleotide sequences are among the most variable sequences in LAB genomes. However, the modular gene organization in eps gene clusters is conserved (Zeidan et al., 2017). The conserved genes in the beginning of the eps gene cluster, which are involved in the modulation and assembly machinery of polysaccharide biosynthesis, were denominated epsRXCDB, according to the nomenclature by Zeidan et al. (2017) and Poulsen et al. (2019), and those at the end, epsL and lytR, while the polymerase was named wzy, and the flippase, wzx. The genes of the variable part include polymerase wzy, polysaccharide transporter also called flippase wzx, and glucosyltransferases (GT) or other polymer-modifying enzymes. The common denominator for the texturing strains is that they all contain the genes required for the polysaccharide production, e.g. epsCDBE-wzy-wzx and GT (Zeidan et al., 2017).

[0448] No putative function could be yet assigned to epsX and epsL. NIZO B40 epsL can be disrupted by single crossover using an internal gene fragment or overproduced without any effect on EPS production (van Kranenburg, 1999). However, it might be that the second copy of epsL takes over, if the one from the eps cluster is not functional.

[0449] EpsR is believed to be responsible for EPS biosynthesis regulation, and thus certain mutations would affect the EPS production. EpsCDB and ATP are believed to form a stable complex acting as a tyrosine kinase—phosphatase system, which controls EPS synthesis, likely through the phosphorylation of epsE, a glycosylphospho-transferase that catalyzes the first step in the assembly of the EPS repeat unit and defines the type of sugar added to the lipid carrier for the formation of EPS. All three genes responsible for tyrosine phosphorylation are essential for the complete encapsulation of the pneumococcus, with cpsC (corresponding to EpsC in L. lactis) being a major virulence factor, crucial via its role in the regulation of the CPS biosynthesis (Whittall et al., 2015). In L. lactis, epsC and epsD were found to be essential for the EPS production, while epsB was not strictly required, as the effect of its deletion was the reduced amount of EPS produced (Nierop Groot and Kleerebezem, 2007). Gene epsE encoding the initial glycose phosphate transferase, which does not catalyze glycosidic linkage, but is involved in linking the first sugar of the repeat unit to the lipid carrier, was shown to be essential for polysaccharide biosynthesis in L. lactis, as its disruption abolished EPS production (Dabour and LaPointe 2005, van Kranenburg et al., 1997).

[0450] Subsequently, the following genes of the eps cluster typically encoding glycosyltransferases, polymerases and transporters, are situated in a variable part of the cluster and do often have a low degree of similarity to already characterized genes, which makes the prediction of their putative functions difficult. Comparison of polysaccharide synthesis operons from 90 pneumococcal serotypes, where polysaccharide biosynthesis is well studied, revealed that central genes responsible for the synthesis and polymerization of the repeat unit are highly variable and often non-homologous between serotypes (Bentley et al., 2006). Wzy-dependent CPS biosynthesis in S. pneumoniae resembles peptidoglycan synthesis, whereby repeat units are built on the inner face of the cytoplasmic membrane, transported to the outer face of the membrane by a Wzx transporter, also called flippase, and polymerized by a Wzy polymerase. The polysaccharide polymerase wzy links individual repeat units to form lipid-linked CPS. In S. pneumonia, 40 homology groups for polysaccharide polymerases were found. The initial sugar of the repeat oligosaccharide unit is also the donor sugar in the polymerization of the repeat units, and the specificity of the Wzy polymerase determines the linkage type. The predictions for initial sugars, and subsequent repeat-unit polymerization linkage, correlate well with the polymerase homology groups. In S. pneumonia, there are 32 polymerase homology groups associated with WchA, five with WciI, four with WcjG and one with WcjH. These associations are mostly exclusive, with only five polymerase homology groups associated with two initial transferases, which indicates a high specificity of the initial transferases (Bentley et al., 2006).

[0451] Accordingly, generally, the eps gene clusters of Lactococcus sp. strains have high similarity within the conserved regions (e.g., epsRXCDBE, epsL and lytR), but the remaining part of the eps genes, including wzy, wzx, the GT genes and other oligosaccharide repeating unit modifying genes, if present, are generally more variable, both in terms of sequence and in terms of genes present. Without being limited to theory, it is currently believed that differences in the genes related to EPS biosynthesis of the variable region (in particular the wzy, wzx and the GT genes, if present) are likely to be responsible for the different EPS structures produced by the different LAB strains, which may have an impact on the differences in the texturing capability of the different LAB strains.

[0452] As discussed above, a first aspect of the present invention relates to a Lactococcus lactic lactic acid bacterium (LAB) strain comprising an active eps gene cluster capable of producing exopolysaccharide (EPS), wherein the eps gene cluster comprises at least one, preferably two, more preferably three, even more preferably all of nucleotide sequence selected from the nucleotide sequences (a)-(m), as the case may be, see below, as defined in any one of (i) to (x).

[0453] In a preferred embodiment, the eps gene cluster comprises all of the nucleotide sequences (a)-(c) (i.e., (a) to (c3)/(c4)/(c6), as the case may be, see below) as defined in any one of (i) to (x), see below.

[0454] In the most preferred embodiment, the eps gene cluster comprises all of the nucleotide sequences (a)-(m), as the case may be, (e.g., (a), (b), (c1), (c2), (c3) and (d) for the LAB as defined in (i), (a), (b), (c1), (c2), (c3), (c3), (c4), (c5), (d), (e), (f), (g), (h) and (i) for the LAB as defined in (ii), (a), (b), (c1), (c2), (c3) and (d) for the LAB as defined in (iii), (a), (b), (c1), (c2), (c3), (c4) and (d) for the LAB as defined in (iv), (a), (c1), (c2), (c3), (c4), (d), (e), (f), (g), (h), (i), and (j) for the LAB as defined in (v), (a), (b), (c1), (c2), (c3), (c4), (c5), (c6), (d), (e), (f), (g), (h), (i), (j), (k), (l) and (m) for the LAB as defined in (vi), (a), (c1) (c2) and (d) for the LAB as defined in (vii), (a), (b), (c1), (c2), (c3), (c4), (c5), (c6), (d), (e) and (f) for the LAB as defined in (viii), (a), (b), (c1), (c2), (c3), (d) and (e) for the LAB as defined in (ix) and (a), (b), (c1), (c2), (c3), (d) and (e) for the LAB as defined in (x)), as defined in any one of (i) to (x):
[0455] (i) (a): a nucleotide sequence encoding a polypeptide having polymerase activity and having at least 70%, preferably at least 85%, more preferably at least 95%, even more preferably at least 98%, and most preferably 100% identity with the amino acid sequence encoded by the nucleotide sequence of SEQ ID NO: 11 (herein termed wzy);
   [0456] (b): a nucleotide sequence encoding a polypeptide having polysaccharide transporter activity and having at least 70%, preferably at least 85%, more preferably at least 95%, even more preferably at least 98%, and most preferably 100% identity with the amino acid sequence encoded by the nucleotide sequence of SEQ ID NO: 17 (herein termed wzx);
   [0457] (c): at least one, preferably two, and most preferably three nucleotide sequence(s) encoding a polypeptide having glycosyltransferase (GT) activity selected from:
   [0458] (c1): a nucleotide sequence having at least 70%, preferably at least 85%, more preferably at least 95%, even more preferably at least 98%, and most preferably 100% identity with the amino acid sequence encoded by the nucleotide sequence of SEQ ID NO: 9 (herein termed GT1);
   [0459] (c2): a nucleotide sequence having at least 70%, preferably at least 85%, more preferably at least 95%, even more preferably at least 98%, and most preferably 100% identity with the amino acid sequence encoded by the nucleotide sequence of SEQ ID NO: 13 (herein termed GT2); and
   [0460] (c3): a nucleotide sequence having at least 70%, preferably at least 85%, more preferably at least 95%, even more preferably at least 98%, and most preferably 100% with the amino acid sequence encoded by the nucleotide sequence of SEQ ID NO: 15 (herein termed GT3);
   [0461] (d): a nucleotide sequence having at least 70%, preferably at least 85%, more preferably at least 95%, even more preferably at least 98%, and most preferably 100% identity with the amino acid sequence encoded by the nucleotide sequence of SEQ ID NO: 23 (herein termed putative nucleotide sugar dehydrogenase protein);
[0462] (ii) (a): a nucleotide sequence encoding a polypeptide having polymerase activity and having at least 70%, preferably at least 85%, more preferably at least 95%, even more preferably at least 98%, and most preferably 100% identity with the amino acid sequence encoded by nucleotides 13939-15042 of SEQ ID NO:199 (herein termed wzy);
   [0463] (b): a nucleotide sequence encoding a polypeptide having polysaccharide transporter activity and having at least 70%, preferably at least 85%, more preferably at least 95%, even more preferably at least 98%, and most preferably 100% identity with the amino acid sequence encoded by nucleotides 26029-27444 of the complementary strand of SEQ ID NO:199 (herein termed wzx);
   [0464] (c): at least one, preferably two, and more preferably three, even more preferably four and most preferably five nucleotide sequence(s) encoding a polypeptide having glycosyltransferase (GT) activity selected from:
   [0465] (c1): a nucleotide sequence having at least 70%, preferably at least 85%, more preferably at least 95%, even more preferably at least 98%, and most preferably 100% identity with the amino acid sequence encoded by nucleotides 4174-4824 of SEQ ID NO:199 (herein termed GT1);
   [0466] (c2): a nucleotide sequence having at least 70%, preferably at least 85%, more preferably at least 95%, even more preferably at least 98%, and most preferably 100% identity with the amino acid sequence encoded by nucleotides 7276-8508 of SEQ ID NO:199 (herein termed GT2);
   [0467] (c3): a nucleotide sequence having at least 70%, preferably at least 85%, more preferably at least 95%, even more preferably at least 98%, and most preferably 100% identity with the amino acid sequence encoded by nucleotides 11042-12391 of SEQ ID NO:199 (herein termed GT3);
   [0468] (c4): a nucleotide sequence having at least 70%, preferably at least 85%, more preferably at least 95%, even more preferably at least 98%, and most preferably 100% identity with the amino acid sequence encoded by nucleotides 13008-13934 of SEQ ID NO:199 (herein termed GT4);
   [0469] (c5): a nucleotide sequence having at least 70%, preferably at least 85%, more preferably at least 95%, even more preferably at least 98%, and most preferably 100% identity with the amino acid sequence encoded by nucleotides 18528-19508 of SEQ ID NO:199 (herein termed GT5);
   [0470] (d): a nucleotide sequence encoding a polypeptide having dTDP-glucose 4,6-dehydratase activity and having at least 70%, preferably at least 85%, more preferably at least 95%, even more preferably at least 98%, and most preferably 100% identity with the amino acid sequence encoded by nucleotides 4784-5695 of SEQ ID NO:199 (herein termed dTDP-glucose 4,6-dehydratase);
   [0471] (e): a nucleotide sequence encoding a polypeptide having dTDP-4-dehydrorhamnose reductase activity and having at least 70%, preferably at least 85%, more preferably at least 95%, even more preferably at least 98%, and most preferably 100% identity with the amino acid sequence encoded by nucleotides 5717-6631 of SEQ ID NO:199 (herein termed dTDP-4-dehydrorhamnose reductase);
   [0472] (f): a nucleotide sequence encoding a polypeptide having dTDP-4-dehydrorhamnose 3,5-epimerase activity and having at least 70%, preferably at least 85%, more preferably at least 95%, even more preferably at least 98%, and most preferably 100% identity with the amino acid sequence encoded by nucleotides 6586-7257 of SEQ ID NO:199 (herein termed dTDP-4-dehydrorhamnose 3,5-epimerase);
   [0473] (g): a nucleotide sequence encoding polypeptide DUF1919 and having at least 70%, preferably at least 85%, more preferably at least 95%, even more preferably at least 98%, and most preferably 100% identity with the amino acid sequence encoded by nucleotides 8515-9144 of SEQ ID NO:199 (herein termed DUF1919);
   [0474] (h): a nucleotide sequence encoding polypeptide DUF4422 and having at least 70%, preferably at least 85%, more preferably at least 95%, even more preferably at least 98%, and most preferably 100% identity with the amino acid sequence encoded by nucleotides 10271-11029 of SEQ ID NO:199 (herein termed DUF4422); and
   [0475] (i): a nucleotide sequence encoding a polypeptide having UDP-galactopyranose mutase activity and having at least 70%, preferably at least 85%, more preferably at least 95%, even more preferably at least 98%, and most preferably 100% identity with the amino acid sequence encoded by nucleotides 9159-10274 of SEQ ID NO:199 (herein termed UDP-galactopyranose mutase);
[0476] (iii) (a): a nucleotide sequence encoding a polypeptide having polymerase activity and having at least 70%, preferably at least 85%, more preferably at least 95%, even more preferably at least 98%, and most preferably 100% identity with the amino acid sequence encoded by the nucleotide sequence of SEQ ID NO: 39 (herein termed wzy);
   [0477] (b): a nucleotide sequence encoding a polypeptide having polysaccharide transporter activity and having at least 70%, preferably at least 85%, more preferably at least 95%, even more preferably at least 98%, and most preferably 100% identity with the amino acid sequence encoded by the nucleotide sequence of SEQ ID NO: 45 (herein termed wzx);
   [0478] (c): at least one, preferably two, and most preferably three nucleotide sequence(s) encoding a polypeptide having glycosyltransferase (GT) activity selected from:
   [0479] (c1): a nucleotide sequence having at least 70%, preferably at least 85%, more preferably at least 95%, even more preferably at least 98%, and most preferably 100% identity with the amino acid sequence encoded by the nucleotide sequence of SEQ ID NO: 37 (herein termed GT1);
   [0480] (c2): a nucleotide sequence having at least 70%, preferably at least 85%, more preferably at least 95%, even more preferably at least 98%, and most preferably 100% identity with the amino acid sequence encoded by the nucleotide sequence of SEQ ID NO: 41 (herein termed GT2); and
   [0481] (c3): a nucleotide sequence having at least 70%, preferably at least 85%, more preferably at least 95%, even more preferably at least 98%, and most preferably 100% identity with the amino acid sequence encoded by the nucleotide sequence of SEQ ID NO: 43 (herein termed GT3); and
   [0482] (d): a nucleotide sequence encoding a polypeptide having polysaccharide pyruvyl transferase activity and having at least 70%, preferably at least 85%, more preferably at least 95%, even more preferably at least 98%, and most preferably 100% identity with the amino acid sequence encoded by the nucleotide sequence of SEQ ID NO: 51 (herein termed polysaccharide pyruvyl transferase family protein);
[0483] (iv) (a): a nucleotide sequence encoding a polypeptide having polymerase activity and having at least 70%, preferably at least 85%, more preferably at least 95%, even more preferably at least 98%, and most preferably 100% identity with the amino acid sequence encoded by the nucleotide sequence of SEQ ID NO: 163 (herein termed wzy);
   [0484] (b): a nucleotide sequence encoding a polypeptide having polysaccharide transporter activity and having at least 70%, preferably at least 85%, more preferably at least 95%, even more preferably at least 98%, and most preferably 100% identity with the amino acid sequence encoded by the nucleotide sequence of SEQ ID NO: 169 (herein termed wzx);
   [0485] (c): at least one, preferably two, and most preferably three nucleotide sequence(s) encoding a polypeptide having glycosyltransferase (GT) activity selected from:
   [0486] (c1): a nucleotide sequence having at least 70%, preferably at least 85%, more preferably at least 95%, even more preferably at least 98%, and most preferably 100% identity with the amino acid sequence encoded by the nucleotide sequence of SEQ ID NO: 161 (herein termed GT1);
   [0487] (c2): a nucleotide sequence having at least 70%, preferably at least 85%, more preferably at least 95%, even more preferably at least 98%, and most preferably 100% identity with the amino acid sequence encoded by the nucleotide sequence of SEQ ID NO: 165 (herein termed GT2);
   [0488] (c3): a nucleotide sequence having at least 70%, preferably at least 85%, more preferably at least 95%, even more preferably at least 98%, and most preferably 100% identity with the amino acid sequence encoded by the nucleotide sequence of SEQ ID NO: 167 (herein termed GT3); and
   [0489] (c4) a nucleotide sequence having at least 70%, preferably at least 85%, more preferably at least 95%, even more preferably at least 98%, and most preferably 100% identity with the amino acid sequence encoded by the nucleotide sequence of SEQ ID NO: 181 (herein termed GT4);
   [0490] (d) a nucleotide sequence encoding a polypeptide having at least 70%, preferably at least 85%, more preferably at least 95%, even more preferably at least 98%, and most preferably 100% identity with the amino acid sequence encoded by the nucleotide sequence of SEQ ID NO: 175 (herein termed Core-2/I-Branching protein);
[0491] (v) (a): a nucleotide sequence encoding a polypeptide having polymerase activity and having at least 70%, preferably at least 85%, more preferably at least 95%, even more preferably at least 98%, and most preferably 100% identity with the amino acid sequence encoded by nucleotides 13939-15042 of SEQ ID NO: 224 (herein termed wzy);
   [0492] (c): at least one, preferably two, and most preferably three nucleotide sequence(s) encoding a polypeptide having glycosyltransferase (GT) activity selected from:
   [0493] (c1): a nucleotide sequence having at least 70%, preferably at least 85%, more preferably at least 95%, even more preferably at least 98%, and most preferably 100% identity with the amino acid sequence encoded by nucleotides 4174-4824 of SEQ ID NO: 224 (herein termed GT1);
   [0494] (c2): a nucleotide sequence having at least 70%, preferably at least 85%, more preferably at least 95%, even more preferably at least 98%, and most preferably 100% identity with the amino acid sequence encoded by nucleotides 11042-12391 of SEQ ID NO: 224 (herein termed GT2);
   [0495] (c3): a nucleotide sequence having at least 70%, preferably at least 85%, more preferably at least 95%, even more preferably at least 98%, and most preferably 100% identity with the amino acid sequence encoded by nucleotides 13008-13934 of SEQ ID NO: 224 (herein termed GT3); and
   [0496] (c4): a nucleotide sequence having at least 70%, preferably at least 85%, more preferably at least 95%, even more preferably at least 98%, and most preferably 100% identity with the amino acid sequence encoded by nucleotides 18527-19507 of SEQ ID NO: 224 (herein termed GT4);
   [0497] (d): a nucleotide sequence encoding polypeptide DUF1972, and having at least 70%, preferably at least 85%, more preferably at least 95%, even more preferably at least 98%, and most preferably 100% identity with the amino acid sequence encoded by nucleotides 7276-8508 of SEQ ID NO: 224 (herein termed DUF1972);
   [0498] (e): a nucleotide sequence encoding polypeptide DUF4422 and having at least 70%, preferably at least 85%, more preferably at least 95%, even more preferably at least 98%, and most preferably 100% identity with the amino acid sequence encoded by nucleotides 10271-11029 of SEQ ID NO: 224 (herein termed DUF4422);
   [0499] (f): a nucleotide sequence encoding polypeptide DUF1919 and having at least 70%, preferably at least 85%, more preferably at least 95%, even more preferably at least 98%, and most preferably 100% identity with the amino acid sequence encoded by nucleotides 8515-9144 of SEQ ID NO: 224 (herein termed DUF1919);
   [0500] (g): a nucleotide sequence encoding a polypeptide having UDP-galactopyranose mutase activity and having at least 70%, preferably at least 85%, more preferably at least 95%, even more preferably at least 98%, and most preferably 100% identity with the amino acid sequence encoded by nucleotides 9159-10274 of SEQ ID NO: 224 (herein termed UDP-galactopyranose mutase);
   [0501] (h): a nucleotide sequence encoding a polypeptide having dTDP-4-dehydrorhamnose 3,5-epimerase activity and having at least 70%, preferably at least 85%, more preferably at least 95%, even more preferably at least 98%, and most preferably 100% identity with the amino acid sequence encoded by nucleotides 6586-7257 of SEQ ID NO: 224 (herein termed dTDP-4-dehydrorhamnose 3,5-epimerase);
   [0502] (i): a nucleotide sequence encoding a polypeptide having dTDP-glucose 4,6-dehydratase activity and having at least 70%, preferably at least 85%, more preferably at least 95%, even more preferably at least 98%, and most preferably 100% identity with the amino acid sequence encoded by nucleotides 4784-5695 of SEQ ID NO: 224 (herein termed dTDP-glucose 4,6-dehydratase); and
   [0503] (j): a nucleotide sequence encoding a polypeptide having dTDP-4-dehydrorhamnose reductase activity and having at least 70%, preferably at least 85%, more preferably at least 95%, even more preferably at least 98%, and most preferably 100% identity with the amino acid sequence encoded by nucleotides 5717-6631 of SEQ ID NO: 224 (herein termed dTDP-4-dehydrorhamnose reductase);
[0504] (vi) (a): a nucleotide sequence encoding a polypeptide having polymerase activity and having at least 95% identity with the amino acid sequence encoded by the nucleotide sequence of SEQ ID NO: 67 (herein termed wzy);
   [0505] (b): a nucleotide sequence encoding a polypeptide having polysaccharide transporter activity and having at least 70%, preferably at least 85%, more preferably at least 95%, even more preferably at least 98%, and most preferably 100% identity with the amino acid sequence encoded by the nucleotide sequence of SEQ ID NO: 73 (herein termed wzx);
   [0506] (c): at least one, preferably two, and most preferably three nucleotide sequence(s) encoding a polypeptide having glycosyltransferase (GT) activity selected from:
   [0507] (c1): a nucleotide sequence having at least 70%, preferably at least 85%, more preferably at least 95%, even more preferably at least 98%, and most preferably 100% identity with the amino acid sequence encoded by the nucleotide sequence of SEQ ID NO: 65 (herein termed GT1);
   [0508] (c2): a nucleotide sequence having at least 70%, preferably at least 85%, more preferably at least 95%, even more preferably at least 98%, and most preferably 100% identity with the amino acid sequence encoded by the nucleotide sequence of SEQ ID NO: 69 (herein termed GT2);
   [0509] (c3): a nucleotide sequence having at least 70%, preferably at least 85%, more preferably at least 95%, even more preferably at least 98%, and most preferably 100% identity with the amino acid sequence encoded by the nucleotide sequence of SEQ ID NO: 71 (herein termed GT3);
   [0510] (c4): a nucleotide sequence having at least 70%, preferably at least 85%, more preferably at least 95%, even more preferably at least 98%, and most preferably 100% identity with the amino acid sequence encoded by the nucleotide sequence of SEQ ID NO: 85 (herein termed GT4);
   [0511] (c5): a nucleotide sequence having at least 70%, preferably at least 85%, more preferably at least 95%, even more preferably at least 98%, and most preferably 100% identity with the amino acid sequence encoded by the nucleotide sequence of SEQ ID NO: 87 (herein termed GT5); and
   [0512] (c6): a nucleotide sequence having at least 70%, preferably at least 85%, more preferably at least 95%, even more preferably at least 98%, and most preferably 100% identity with the amino acid sequence encoded by the nucleotide sequence of SEQ ID NO: 89 (herein termed GT6);
   [0513] (d): a nucleotide sequence having epimerase/dehydratase activity and having at least 70%, preferably at least 85%, more preferably at least 95%, even more preferably at least 98%, and most preferably 100% identity with the amino acid sequence encoded by the nucleotide sequence of SEQ ID NO: 93 (herein termed NAD-dependent epimerase/dehydratase 1);
   [0514] (e): a nucleotide sequence having dehydrogenase activity and having at least 70%, preferably at least 85%, more preferably at least 95%, even more preferably at least 98%, and most preferably 100% identity with the amino acid sequence encoded by the nucleotide sequence of SEQ ID NO: 79 (herein termed nucleotide sugar dehydrogenase);
   [0515] (f): a nucleotide sequence having thymidylyltransferase activity and having at least 70%, preferably at least 85%, more preferably at least 95%, even more preferably at least 98%, and most preferably 100% identity with the amino acid sequence encoded by the nucleotide sequence of SEQ ID NO: 95 (herein termed rfbA, glucose-1-phosphate thymidylyltransferase);
   [0516] (g): a nucleotide sequence having dehydratase activity and having at least 70%, preferably at least 85%, more preferably at least 95%, even more preferably at least 98%, and most preferably 100% identity with the amino acid sequence encoded by the nucleotide sequence of SEQ ID NO: 97 (herein termed dTDP-glucose 4,6-dehydratase);
   [0517] (h): a nucleotide sequence having epimerase activity and having at least 70%, preferably at least 85%, more preferably at least 95%, even more preferably at least 98%, and most preferably 100% identity with the amino acid sequence encoded by the nucleotide sequence of SEQ ID NO: 99 (herein termed dTDP-4-dehydrorhamnose 3,5-epimerase);
   [0518] (i): a nucleotide sequence having epimerase/dehydratase activity and having at least 70%, preferably at least 85%, more preferably at least 95%, even more preferably at least 98%, and most preferably 100% identity with the amino acid sequence encoded by the nucleotide sequence of SEQ ID NO: 101 (herein termed NAD-dependent epimerase/dehydratase family protein 2);
   [0519] (j): a nucleotide sequence having acyltransferase activity and having at least 70%, preferably at least 85%, more preferably at least 95%, even more preferably at least 98%, and most preferably 100% identity with the amino acid sequence encoded by the nucleotide sequence of SEQ ID NO: 111 (herein termed acyltransferase 1);
   [0520] (k): a nucleotide sequence having acyltransferase activity and having at least 70%, preferably at least 85%, more preferably at least 95%, even more preferably at least 98%, and most preferably 100% identity with the amino acid sequence encoded by the nucleotide sequence of SEQ ID NO: 107 (herein termed acyltransferase 2);
   [0521] (l): a nucleotide sequence having reductase activity and having at least 70%, preferably at least 85%, more preferably at least 95%, even more preferably at least 98%, and most preferably 100% identity with the amino acid sequence encoded by the nucleotide sequence of SEQ ID NO: 103 (herein termed dTDP-4-dehydrorhamnose reductase); and
   [0522] (m): a nucleotide sequence having nucleotidyl transferase activity and having at least 70%, preferably at least 85%, more preferably at least 95%, even more preferably at least 98%, and most preferably 100% identity with the amino acid sequence encoded by the nucleotide sequence of SEQ ID NO: 105 (herein termed nucleotidyl transferase);
[0523] (vii) (a): a nucleotide sequence encoding a polypeptide having polymerase activity and having at least 70%, preferably at least 85%, more preferably at least 95%, even more preferably at least 98%, and most preferably 100% identity with the amino acid sequence encoded by nucleotides 5833-6927 of SEQ ID NO: 244 (herein termed wzy);
   [0524] (c): at least one, preferably two, and most preferably three nucleotide sequence(s) encoding a polypeptide having glycosyltransferase (GT) activity selected from:
   [0525] (c1): a nucleotide sequence having at least 70%, preferably at least 85%, more preferably at least 95%, even more preferably at least 98%, and most preferably 100% identity with the amino acid sequence encoded by nucleotides 4617-5123 of SEQ ID NO: 244 (herein termed GT1); and
   [0526] (c2): a nucleotide sequence having at least 70%, preferably at least 85%, more preferably at least 95%, even more preferably at least 98%, and most preferably 100% identity with the amino acid sequence encoded by nucleotides 5120-5827 of SEQ ID NO: 244 (herein termed GT2); and
   [0527] (d): a nucleotide sequence encoding a polypeptide having UDP-N-acetylglucosamine-LPS N-acetylglucosamine transferase activity and having at least 70%, preferably at least 85%, more preferably at least 95%, even more preferably at least 98%, and most preferably 100% identity with the amino acid sequence encoded by nucleotides 4168-4617 of SEQ ID NO: 244 (herein termed UDP-N-acetylglucosamine-LPS N-acetylglucosa mine transferase);
[0528] (viii) (a): a nucleotide sequence encoding a polypeptide having polymerase activity and having at least 70%, preferably at least 85%, more preferably at least 95%, even more preferably at least 98%, and most preferably 100% identity with the amino acid sequence encoded by the nucleotide sequence of SEQ ID NO: 123 (herein termed wzy);
   [0529] (b): a nucleotide sequence encoding a polypeptide having polysaccharide transporter activity and having at least 70%, preferably at least 85%, more preferably at least 95%, even more preferably at least 98%, and most preferably 100% identity with the amino acid sequence encoded by the nucleotide sequence of SEQ ID NO: 129 (herein termed wzx);
   [0530] (c): at least one, preferably two, and most preferably three nucleotide sequence(s) encoding a polypeptide having glycosyltransferase (GT) activity selected from:
   [0531] (c1): a nucleotide sequence having at least 70%, preferably at least 85%, more preferably at least 95%, even more preferably at least 98%, and most preferably 100% identity with the amino acid sequence encoded by the nucleotide sequence of SEQ ID NO: 121 (herein termed GT1);
   [0532] (c2): a nucleotide sequence having at least 70%, preferably at least 85%, more preferably at least 95%, even more preferably at least 98%, and most preferably 100% identity with the amino acid sequence encoded by the nucleotide sequence of SEQ ID NO: 125 (herein termed GT2);
   [0533] (c3): a nucleotide sequence having at least 70%, preferably at least 85%, more preferably at least 95%, even more preferably at least 98%, and most preferably 100% identity with the amino acid sequence encoded by the nucleotide sequence of SEQ ID NO: 127 (herein termed GT3);
   [0534] (c4): a nucleotide sequence having at least 70%, preferably at least 85%, more preferably at least 95%, even more preferably at least 98%, and most preferably 100% identity with the amino acid sequence encoded by the nucleotide sequence of SEQ ID NO: 143 (herein termed GT4);
   [0535] (c5): a nucleotide sequence having at least 70%, preferably at least 85%, more preferably at least 95%, even more preferably at least 98%, and most preferably 100% identity with the amino acid sequence encoded by the nucleotide sequence of SEQ ID NO: 145 (herein termed GT5); and
   [0536] (c6): a nucleotide sequence having at least 70%, preferably at least 85%, more preferably at least 95%, even more preferably at least 98%, and most preferably 100% identity with the amino acid sequence encoded by the nucleotide sequence of SEQ ID NO: 147 (herein termed GT6);
   [0537] (d): a nucleotide sequence encoding a polypeptide having acetyltransferase activity and having at least 70%, preferably at least 85%, more preferably at least 95%, even more preferably at least 98%, and most preferably 100% identity with the amino acid sequence encoded by the nucleotide sequence of SEQ ID NO: 149 (herein termed acetyltransferase);
   [0538] (e): a nucleotide sequence encoding a polypeptide having dehydrogenase activity and having at least 70%, preferably at least 85%, more preferably at least 95%, even more preferably at least 98%, and most preferably 100% identity with the amino acid sequence encoded by the nucleotide sequence of SEQ ID NO: 135 (herein termed nucleotide sugar dehydrogenase);
   [0539] (f): a nucleotide sequence encoding a polypeptide having acyltransferase activity and having at least 70%, preferably at least 85%, more preferably at least 95%, even more preferably at least 98%, and most preferably 100% identity with the amino acid sequence encoded by the nucleotide sequence of SEQ ID NO: 151 (herein termed acyltransferase);
[0540] (ix) (a): a nucleotide sequence encoding a polypeptide having polymerase activity and having at least 70%, preferably at least 85%, more preferably at least 95%, even more preferably at least 98%, and most preferably 100% identity with the amino acid sequence encoded by nucleotides 11201-12349 of the complementary strand of SEQ ID NO: 257 (herein termed wzy);
   [0541] (b): a nucleotide sequence encoding a polypeptide having polysaccharide transporter activity and having at least 70%, preferably at least 85%, more preferably at least 95%, even more preferably at least 98%, and most preferably 100% identity with the amino acid sequence encoded by nucleotides 15538-16953 of the complementary strand of SEQ ID NO: 257 (herein termed wzx);
   [0542] (c): a nucleotide sequence encoding a polypeptide having glycosyltransferase (GT) activity comprising:
   [0543] (c1): a nucleotide sequence having at least 70%, preferably at least 85%, more preferably at least 95%, even more preferably at least 98%, and most preferably 100% identity with the amino acid sequence encoded by nucleotides 9726-10673 of the complementary strand of SEQ ID NO: 257 (herein termed GT1);
   [0544] (c2): a nucleotide sequence having at least 70%, preferably at least 85%, more preferably at least 95%, even more preferably at least 98%, and most preferably 100% identity with the amino acid sequence encoded by nucleotides 12336-13421 of the complementary strand of SEQ ID NO: 257 (herein termed GT2); and
   [0545] (c3): a nucleotide sequence having at least 70%, preferably at least 85%, more preferably at least 95%, even more preferably at least 98%, and most preferably 100% identity with the amino acid sequence encoded by nucleotides 13418-14260 of the complementary strand of SEQ ID NO: 257 (herein termed GT3);
   [0546] (d): a nucleotide sequence encoding a polypeptide having nucleotide sugar dehydrogenase activity and having at least 70%, preferably at least 85%, more preferably at least 95%, even more preferably at least 98%, and most preferably 100% identity with the amino acid sequence encoded by nucleotides 7727-8173 of the complementary strand of SEQ ID NO: 257 (herein termed nucleotide sugar dehydrogenase); and
   [0547] (e): a nucleotide sequence encoding a polypeptide having acetyltransferase activity and having at least 70%, preferably at least 85%, more preferably at least 95%, even more preferably at least 98%, and most preferably 100% identity with the amino acid sequence encoded by nucleotides 10657-11211 of the complementary strand of SEQ ID NO: 257 (herein termed acetyltransferase);
[0548] (x) a): a nucleotide sequence encoding a polypeptide having polymerase activity and having at least 70%, preferably at least 85%, more preferably at least 95%, even more preferably at least 98%, and most preferably 100% identity with the amino acid sequence encoded by nucleotides 10707-11846 of the complementary strand of SEQ ID NO: 274 (herein termed wzy);
   [0549] (b): a nucleotide sequence encoding a polypeptide having polysaccharide transporter activity and having at least 70%, preferably at least 85%, more preferably at least 95%, even more preferably at least 98%, and most preferably 100% identity with the amino acid sequence encoded by nucleotides 15037-16476 of the complementary strand of SEQ ID NO: 274 (herein termed wzx);
   [0550] (c): a nucleotide sequence encoding a polypeptide having glycosyltransferase (GT) activity comprising:
   [0551] (c1): a nucleotide sequence having at least 70%, preferably at least 85%, more preferably at least 95%, even more preferably at least 98%, and most preferably 100% identity with the amino acid sequence encoded by nucleotides 9232-10179 of the complementary strand of SEQ ID NO: 274 (herein termed GT1);
   [0552] (c2): a nucleotide sequence having at least 70%, preferably at least 85%, more preferably at least 95%, even more preferably at least 98%, and most preferably 100% identity with the amino acid sequence encoded by nucleotides 11833-12918 of the complementary strand of SEQ ID NO: 274 (herein termed GT2); and
   [0553] (c3): a nucleotide sequence having at least 70%, preferably at least 85%, more preferably at least 95%, even more preferably at least 98%, and most preferably 100% identity with the amino acid sequence encoded by nucleotides 12915-13757 of the complementary strand of SEQ ID NO: 274 (herein termed GT3);
   [0554] (d): a nucleotide sequence encoding a polypeptide having nucleotide sugar dehydrogenase activity and having at least 70%, preferably at least 85%, more preferably at least 95%, even more preferably at least 98%, and most preferably 100% identity with the amino acid sequence encoded by nucleotides 7234-7680 of the complementary strand of SEQ ID NO: 274 (herein termed nucleotide sugar dehydrogenase); and
   [0555] (e): a nucleotide sequence encoding a polypeptide having acetyltransferase activity and having at least 70%, preferably at least 85%, more preferably at least 95%, even more preferably at least 98%, and most preferably 100% identity with the amino acid sequence encoded by nucleotides 10163-10717 of the complementary strand of SEQ ID NO: 274 (herein termed acetyltransferase).

[0556] The above sequences are all present in the variable part of the eps gene cluster of the strains of the present invention.

[0557] Accordingly, in a preferred embodiment, the Lactococcus lactis lactic acid bacterium (LAB) strain of the present invention comprises an active eps gene cluster capable of producing exopolysaccharide (EPS), wherein the eps gene cluster comprises all nucleotide sequences (a)-(c), if present, see above, as defined in any one of (i) to (x) above.

[0558] In the most preferred embodiment, the Lactococcus lactis lactic acid bacterium (LAB) strain of the present invention comprises an active eps gene cluster capable of producing exopolysaccharide (EPS), wherein the eps gene cluster comprises all nucleotide sequences (a)-(m), as the case may be, see above, as defined in any one of (i) to (x) above.

[0559] Preferably, the Lactococcus lactis lactic acid bacterium (LAB) strain of the present invention comprises an active eps gene cluster capable of producing exopolysaccharide (EPS), preferably wherein the eps gene cluster comprises all nucleotide sequences (a)-(c), as the case may be, as defined in any one of (i) to (x) above, even more preferably wherein the eps gene cluster comprises all nucleotide sequences (a)-(m), as the case may be, as defined in any one of (i) to (x) above and at least one, preferably all of the following nucleotide sequences:
[0560] (i) (1): a nucleotide sequence having at least 70%, preferably at least 85%, more preferably at least 95%, even more preferably at least 98%, and most preferably 100% identity with the amino acid sequence encoded by the nucleotide sequence of SEQ ID NO: 1 (herein termed epsR);
   [0561] (2): a nucleotide sequence having at least 70%, preferably at least 85%, more preferably at least 95%, even more preferably at least 98%, and most preferably 100% identity with the amino acid sequence encoded by the nucleotide sequence of SEQ ID NO: 3 (herein termed epsX);
   [0562] (3): a nucleotide sequence having at least 70%, preferably at least 85%, more preferably at least 95%, even more preferably at least 98%, and most preferably 100% identity with the amino acid sequence encoded by the nucleotide sequence of SEQ ID NO: 5 (herein termed epsB);
   [0563] (4): a nucleotide sequence having at least 70%, preferably at least 85%, more preferably at least 95%, even more preferably at least 98%, and most preferably 100% identity with the amino acid sequence encoded by the nucleotide sequence of SEQ ID NO: 7 (herein termed epsD);
   [0564] (5): a nucleotide sequence having at least 70%, preferably at least 85%, more preferably at least 95%, even more preferably at least 98%, and most preferably 100% identity with the amino acid sequence encoded by the nucleotide sequence of SEQ ID NO: 19 (herein termed epsL);
   [0565] (6): a nucleotide sequence having at least 70%, preferably at least 85%, more preferably at least 95%, even more preferably at least 98%, and most preferably 100% identity with the amino acid sequence encoded by the nucleotide sequence of SEQ ID NO: 21 (herein termed LytR family transcriptional regulator protein);
   [0566] (7): a nucleotide sequence having at least 70%, preferably at least 85%, more preferably at least 95%, even more preferably at least 98%, and most preferably 100% identity with the amino acid sequence encoded by the nucleotide sequence of SEQ ID NO: 25 (herein termed epsC);
   [0567] (8): a nucleotide sequence having at least 70%, preferably at least 85%, more preferably at least 95%, even more preferably at least 98%, and most preferably 100% identity with the amino acid sequence encoded by the nucleotide sequence of SEQ ID NO: 27 (herein termed epsE);
[0568] (ii) (1): a nucleotide sequence having at least 70%, preferably at least 85%, more preferably at least 95%, even more preferably at least 98%, and most preferably 100% identity with the amino acid sequence encoded by nucleotides 1-318 of SEQ ID NO:199 (herein termed epsR);
   [0569] (2): a nucleotide sequence having at least 70%, preferably at least 85%, more preferably at least 95%, even more preferably at least 98%, and most preferably 100% identity with the amino acid sequence encoded by nucleotides 352-1119 of SEQ ID NO:199 (herein termed epsX);
   [0570] (3): a nucleotide sequence having at least 70%, preferably at least 85%, more preferably at least 95%, even more preferably at least 98%, and most preferably 100% identity with the amino acid sequence encoded by nucleotides 2698 to 3462 of SEQ ID NO:199 (herein termed epsB);
   [0571] (4): a nucleotide sequence having at least 70%, preferably at least 85%, more preferably at least 95%, even more preferably at least 98%, and most preferably 100% identity with the amino acid sequence encoded by nucleotides 1948-2640 of SEQ ID NO:199 (herein termed epsD);
   [0572] (5): a nucleotide sequence having at least 70%, preferably at least 85%, more preferably at least 95%, even more preferably at least 98%, and most preferably 100% identity with the amino acid sequence encoded by nucleotides 24053-24751 of the complementary strand of SEQ ID NO:199 (herein termed epsL);
   [0573] (6): a nucleotide sequence having at least 70%, preferably at least 85%, more preferably at least 95%, even more preferably at least 98%, and most preferably 100% identity with the amino acid sequence encoded by nucleotides 20389-21291 of SEQ ID NO:199 (herein termed LytR family transcriptional regulator protein);
   [0574] (7): a nucleotide sequence having at least 70%, preferably at least 85%, more preferably at least 95%, even more preferably at least 98%, and most preferably 100% identity with the amino acid sequence encoded by nucleotides 1159 to 1938 of SEQ ID NO:199 (herein termed epsC);
   [0575] (8): a nucleotide sequence having at least 70%, preferably at least 85%, more preferably at least 95%, even more preferably at least 98%, and most preferably 100% identity with the amino acid sequence encoded by nucleotides 3484-4170 of SEQ ID NO:199 (herein termed epsE);
[0576] (iii) (1): a nucleotide sequence having at least 70%, preferably at least 85%, more preferably at least 95%, even more preferably at least 98%, and most preferably 100% identity with the amino acid sequence encoded by the nucleotide sequence of SEQ ID NO: 29 (herein termed epsR);
   [0577] (2): a nucleotide sequence having at least 70%, preferably at least 85%, more preferably at least 95%, even more preferably at least 98%, and most preferably 100% identity with the amino acid sequence encoded by the nucleotide sequence of SEQ ID NO: 31 (herein termed epsX);
   [0578] (3): a nucleotide sequence having at least 70%, preferably at least 85%, more preferably at least 95%, even more preferably at least 98%, and most preferably 100% identity with the amino acid sequence encoded by the nucleotide sequence of SEQ ID NO: 33 (herein termed epsB);
   [0579] (4): a nucleotide sequence having at least 70%, preferably at least 85%, more preferably at least 95%, even more preferably at least 98%, and most preferably 100% identity with the amino acid sequence encoded by the nucleotide sequence of SEQ ID NO: 35 (herein termed epsD);
   [0580] (5): a nucleotide sequence having at least 70%, preferably at least 85%, more preferably at least 95%, even more preferably at least 98%, and most preferably 100% identity with the amino acid sequence encoded by the nucleotide sequence of SEQ ID NO: 47 (herein termed epsL);
   [0581] (6): a nucleotide sequence having at least 70%, preferably at least 85%, more preferably at least 95%, even more preferably at least 98%, and most preferably 100% identity with the amino acid sequence encoded by the nucleotide sequence of SEQ ID NO: 49 (herein termed putative LytR family transcriptional regulator protein);
   [0582] (7): a nucleotide sequence having at least 70%, preferably at least 85%, more preferably at least 95%, even more preferably at least 98%, and most preferably 100% identity with the amino acid sequence encoded by the nucleotide sequence of SEQ ID NO: 53 (herein termed epsC);
   [0583] (8): a nucleotide sequence having at least 70%, preferably at least 85%, more preferably at least 95%, even more preferably at least 98%, and most preferably 100% identity with the amino acid sequence encoded by the nucleotide sequence of SEQ ID NO: 55 (herein termed epsE);
[0584] (iv) (1): a nucleotide sequence having at least 70%, preferably at least 85%, more preferably at least 95%, even more preferably at least 98%, and most preferably 100% identity with the amino acid sequence encoded by the nucleotide sequence of SEQ ID NO: 153 (herein termed epsR);
   [0585] (2): a nucleotide sequence having at least 70%, preferably at least 85%, more preferably at least 95%, even more preferably at least 98%, and most preferably 100% identity with the amino acid sequence encoded by the nucleotide sequence of SEQ ID NO: 155 (herein termed epsX);
   [0586] (3): a nucleotide sequence having at least 70%, preferably at least 85%, more preferably at least 95%, even more preferably at least 98%, and most preferably 100% identity with the amino acid sequence encoded by the nucleotide sequence of SEQ ID NO: 157 (herein termed epsB);
   [0587] (4): a nucleotide sequence having at least 70%, preferably at least 85%, more preferably at least 95%, even more preferably at least 98%, and most preferably 100% identity with the amino acid sequence encoded by the nucleotide sequence of SEQ ID NO: 159 (herein termed epsD);
   [0588] (5): a nucleotide sequence having at least 70%, preferably at least 85%, more preferably at least 95%, even more preferably at least 98%, and most preferably 100% identity with the amino acid sequence encoded by the nucleotide sequence of SEQ ID NO: 171 (herein termed epsL);
   [0589] (6): a nucleotide sequence having at least 70%, preferably at least 85%, more preferably at least 95%, even more preferably at least 98%, and most preferably 100% identity with the amino acid sequence encoded by the nucleotide sequence of SEQ ID NO: 173 (herein termed putative LytR family transcriptional regulator protein);
   [0590] (7): a nucleotide sequence having at least 70%, preferably at least 85%, more preferably at least 95%, even more preferably at least 98%, and most preferably 100% identity with the amino acid sequence encoded by the nucleotide sequence of SEQ ID NO: 177 (herein termed epsC); and
   [0591] (8): a nucleotide sequence having at least 70%, preferably at least 85%, more preferably at least 95%, even more preferably at least 98%, and most preferably 100% identity with the amino acid sequence encoded by the nucleotide sequence of SEQ ID NO: 179 (herein termed epsE);
[0592] (v) (1): a nucleotide sequence having at least 70%, preferably at least 85%, more preferably at least 95%, even more preferably at least 98%, and most preferably 100% identity with the amino acid sequence encoded by nucleotides 1-318 of SEQ ID NO: 224 (herein termed epsR);
   [0593] (2): a nucleotide sequence having at least 70%, preferably at least 85%, more preferably at least 95%, even more preferably at least 98%, and most preferably 100% identity with the amino acid sequence encoded by nucleotides 352-1119 of SEQ ID NO: 224 (herein termed epsX);
   [0594] (3): a nucleotide sequence having at least 70%, preferably at least 85%, more preferably at least 95%, even more preferably at least 98%, and most preferably 100% identity with the amino acid sequence encoded by nucleotides 2698-3462 of SEQ ID NO: 224 (herein termed epsB);
   [0595] (4): a nucleotide sequence having at least 70%, preferably at least 85%, more preferably at least 95%, even more preferably at least 98%, and most preferably 100% identity with the amino acid sequence encoded by nucleotides 1948-2640 of SEQ ID NO: 224 (herein termed epsD);
   [0596] (5): a nucleotide sequence having at least 70%, preferably at least 85%, more preferably at least 95%, even more preferably at least 98%, and most preferably 100% identity with the amino acid sequence encoded by nucleotides 20388-21290 of SEQ ID NO: 224 (herein termed LytR family transcriptional regulator protein);
   [0597] (6): a nucleotide sequence having at least 70%, preferably at least 85%, more preferably at least 95%, even more preferably at least 98%, and most preferably 100% identity with the amino acid sequence encoded by nucleotides 1159-1938 of SEQ ID NO: 224 (herein termed epsC);
   [0598] (7): a nucleotide sequence having at least 70%, preferably at least 85%, more preferably at least 95%, even more preferably at least 98%, and most preferably 100% identity with the amino acid sequence encoded by nucleotides 3484-4170 of SEQ ID NO: 224 (herein termed epsE);
[0599] (vi) (1): a nucleotide sequence having at least 70%, preferably at least 85%, more preferably at least 95%, even more preferably at least 98%, and most preferably 100% identity with the amino acid sequence encoded by the nucleotide sequence of SEQ ID NO: 57 (herein termed epsR);
   [0600] (2): a nucleotide sequence having at least 70%, preferably at least 85%, more preferably at least 95%, even more preferably at least 98%, and most preferably 100% identity with the amino acid sequence encoded by the nucleotide sequence of SEQ ID NO: 59 (herein termed epsX);
   [0601] (3): a nucleotide sequence having at least 70%, preferably at least 85%, more preferably at least 95%, even more preferably at least 98%, and most preferably 100% identity with the amino acid sequence encoded by the nucleotide sequence of SEQ ID NO: 61 (herein termed epsB);
   [0602] (4): a nucleotide sequence having at least 70%, preferably at least 85%, more preferably at least 95%, even more preferably at least 98%, and most preferably 100% identity with the amino acid sequence encoded by the nucleotide sequence of SEQ ID NO: 63 (herein termed epsD);
   [0603] (5): a nucleotide sequence having at least 70%, preferably at least 85%, more preferably at least 95%, even more preferably at least 98%, and most preferably 100% identity with the amino acid sequence encoded by the nucleotide sequence of SEQ ID NO: 75 (herein termed epsL);
   [0604] (6): a nucleotide sequence having at least 70%, preferably at least 85%, more preferably at least 95%, even more preferably at least 98%, and most preferably 100% identity with the amino acid sequence encoded by the nucleotide sequence of SEQ ID NO: 77 (herein termed putative LytR family transcriptional regulator protein);
   [0605] (7): a nucleotide sequence having at least 70%, preferably at least 85%, more preferably at least 95%, even more preferably at least 98%, and most preferably 100% identity with the amino acid sequence encoded by the nucleotide sequence of SEQ ID NO: 81 (herein termed epsC);
   [0606] (8): a nucleotide sequence having at least 70%, preferably at least 85%, more preferably at least 95%, even more preferably at least 98%, and most preferably 100% identity with the amino acid sequence encoded by the nucleotide sequence of SEQ ID NO: 83 (herein termed epsE);
[0607] (vii) (1): a nucleotide sequence having at least 70%, preferably at least 85%, more preferably at least 95%, even more preferably at least 98%, and most preferably 100% identity with the amino acid sequence encoded by nucleotides 1-318 of SEQ ID NO: 244 (herein termed epsR);
   [0608] (2): a nucleotide sequence having at least 70%, preferably at least 85%, more preferably at least 95%, even more preferably at least 98%, and most preferably 100% identity with the amino acid sequence encoded by nucleotides 352-1119 of SEQ ID NO: 244 (herein termed epsX);
   [0609] (3): a nucleotide sequence having at least 70%, preferably at least 85%, more preferably at least 95%, even more preferably at least 98%, and most preferably 100% identity with the amino acid sequence encoded by nucleotides 2698-3462 of SEQ ID NO: 244 (herein termed epsB);
   [0610] (4): a nucleotide sequence having at least 70%, preferably at least 85%, more preferably at least 95%, even more preferably at least 98%, and most preferably 100% identity with the amino acid sequence encoded by nucleotides 1948-2643 of SEQ ID NO: 244 (herein termed epsD);
   [0611] (5): a nucleotide sequence having at least 70%, preferably at least 85%, more preferably at least 95%, even more preferably at least 98%, and most preferably 100% identity with the amino acid sequence encoded by nucleotides 9365-10267 of the complementary strand of SEQ ID NO: 244 (herein termed LytR family transcriptional regulator protein);
   [0612] (6): a nucleotide sequence having at least 70%, preferably at least 85%, more preferably at least 95%, even more preferably at least 98%, and most preferably 100% identity with the amino acid sequence encoded by nucleotides 1159-1938 of SEQ ID NO: 244 (herein termed epsC);
   [0613] (7): a nucleotide sequence having at least 70%, preferably at least 85%, more preferably at least 95%, even more preferably at least 98%, and most preferably 100% identity with the amino acid sequence encoded by nucleotides 3484-4164 of SEQ ID NO: 244 (herein termed epsE;
   [0614] (8): a nucleotide sequence having at least 70%, preferably at least 85%, more preferably at least 95%, even more preferably at least 98%, and most preferably 100% identity with the amino acid sequence encoded by nucleotides 8438-9340 of SEQ ID NO: 244 (herein termed epsL);
[0615] (viii) (1): a nucleotide sequence having at least 70%, preferably at least 85%, more preferably at least 95%, even more preferably at least 98%, and most preferably 100% identity with the amino acid sequence encoded by the nucleotide sequence of SEQ ID NO: 113 (herein termed epsR);
   [0616] (2): a nucleotide sequence having at least 70%, preferably at least 85%, more preferably at least 95%, even more preferably at least 98%, and most preferably 100% identity with the amino acid sequence encoded by the nucleotide sequence of SEQ ID NO: 115 (herein termed epsX);
   [0617] (3): a nucleotide sequence having at least 70%, preferably at least 85%, more preferably at least 95%, even more preferably at least 98%, and most preferably 100% identity with the amino acid sequence encoded by the nucleotide sequence of SEQ ID NO: 117 (herein termed epsB);
   [0618] (4): a nucleotide sequence having at least 70%, preferably at least 85%, more preferably at least 95%, even more preferably at least 98%, and most preferably 100% identity with the amino acid sequence encoded by the nucleotide sequence of SEQ ID NO: 119 (herein termed epsD);
   [0619] (5): a nucleotide sequence having at least 70%, preferably at least 85%, more preferably at least 95%, even more preferably at least 98%, and most preferably 100% identity with the amino acid sequence encoded by the nucleotide sequence of SEQ ID NO: 131 (herein termed epsL);
   [0620] (6): a nucleotide sequence having at least 70%, preferably at least 85%, more preferably at least 95%, even more preferably at least 98%, and most preferably 100% identity with the amino acid sequence encoded by the nucleotide sequence of SEQ ID NO: 133 (herein termed putative LytR family transcriptional regulator protein);
   [0621] (7): a nucleotide sequence having at least 70%, preferably at least 85%, more preferably at least 95%, even more preferably at least 98%, and most preferably 100% identity with the amino acid sequence encoded by the nucleotide sequence of SEQ ID NO: 137 (herein termed epsC);
   [0622] (8): a nucleotide sequence having at least 70%, preferably at least 85%, more preferably at least 95%, even more preferably at least 98%, and most preferably 100% identity with the amino acid sequence encoded by the nucleotide sequence of SEQ ID NO: 139 (herein termed epsE1);
   [0623] (9): a nucleotide sequence having at least 70%, preferably at least 85%, more preferably at least 95%, even more preferably at least 98%, and most preferably 100% identity with the amino acid sequence encoded by the nucleotide sequence of SEQ ID NO: 141 (herein termed epsE2);
[0624] (ix) (1): a nucleotide sequence having at least 70%, preferably at least 85%, more preferably at least 95%, even more preferably at least 98%, and most preferably 100% identity with the amino acid sequence encoded by nucleotides 1-318 of SEQ ID NO: 257 (herein termed epsR);
   [0625] (2): a nucleotide sequence having at least 70%, preferably at least 85%, more preferably at least 95%, even more preferably at least 98%, and most preferably 100% identity with the amino acid sequence encoded by nucleotides 407-1120 of SEQ ID NO: 257 (herein termed epsX);
   [0626] (3): a nucleotide sequence having at least 70%, preferably at least 85%, more preferably at least 95%, even more preferably at least 98%, and most preferably 100% identity with the amino acid sequence encoded by nucleotides 2699-3463 of SEQ ID NO: 257 (herein termed epsB);
   [0627] (4): a nucleotide sequence having at least 70%, preferably at least 85%, more preferably at least 95%, even more preferably at least 98%, and most preferably 100% identity with the amino acid sequence encoded by nucleotides 1949-2644 of SEQ ID NO: 257 (herein termed epsD);
   [0628] (5): a nucleotide sequence having at least 70%, preferably at least 85%, more preferably at least 95%, even more preferably at least 98%, and most preferably 100% identity with the amino acid sequence encoded by nucleotides 5876-6778 of SEQ ID NO: 257 (herein termed LytR family transcriptional regulator protein);
   [0629] (6): a nucleotide sequence having at least 70%, preferably at least 85%, more preferably at least 95%, even more preferably at least 98%, and most preferably 100% identity with the amino acid sequence encoded by nucleotides 1160-1939 of SEQ ID NO: 257 (herein termed epsC);
   [0630] (7): a nucleotide sequence having at least 70%, preferably at least 85%, more preferably at least 95%, even more preferably at least 98%, and most preferably 100% identity with the amino acid sequence encoded by nucleotides 3485-4084 of SEQ ID NO: 257 (herein termed epsE1;
   [0631] (8): a nucleotide sequence having at least 70%, preferably at least 85%, more preferably at least 95%, even more preferably at least 98%, and most preferably 100% identity with the amino acid sequence encoded by nucleotides 4085-4840 of SEQ ID NO: 257 (herein termed epsE2;
   [0632] (9): a nucleotide sequence having at least 70%, preferably at least 85%, more preferably at least 95%, even more preferably at least 98%, and most preferably 100% identity with the amino acid sequence encoded by nucleotides 6803-7717 of the complementary strand of SEQ ID NO: 257 (herein termed epsL);
[0633] (x) (1): a nucleotide sequence having at least 70%, preferably at least 85%, more preferably at least 95%, even more preferably at least 98%, and most preferably 100% identity with the amino acid sequence encoded by nucleotides 1-318 of SEQ ID NO: 274 (herein termed epsR);
   [0634] (2): a nucleotide sequence having at least 70%, preferably at least 85%, more preferably at least 95%, even more preferably at least 98%, and most preferably 100% identity with the amino acid sequence encoded by nucleotides 2220-3005 of SEQ ID NO: 274 (herein termed epsB);
   [0635] (3): a nucleotide sequence having at least 70%, preferably at least 85%, more preferably at least 95%, even more preferably at least 98%, and most preferably 100% identity with the amino acid sequence encoded by nucleotides 1470-2165 of SEQ ID NO: 274 (herein termed epsD);
   [0636] (4): a nucleotide sequence having at least 70%, preferably at least 85%, more preferably at least 95%, even more preferably at least 98%, and most preferably 100% identity with the amino acid sequence encoded by nucleotides 5383-6285 of SEQ ID NO: 274 (herein termed LytR family transcriptional regulator protein);
   [0637] (5): a nucleotide sequence having at least 70%, preferably at least 85%, more preferably at least 95%, even more preferably at least 98%, and most preferably 100% identity with the amino acid sequence encoded by nucleotides 681-1460 of SEQ ID NO: 274 (herein termed epsC);
   [0638] (6): a nucleotide sequence having at least 70%, preferably at least 85%, more preferably at least 95%, even more preferably at least 98%, and most preferably 100% identity with the amino acid sequence encoded by nucleotides 2992-3591 of SEQ ID NO: 274 (herein termed epsE1);
   [0639] (7): a nucleotide sequence having at least 70%, preferably at least 85%, more preferably at least 95%, even more preferably at least 98%, and most preferably 100% identity with the amino acid sequence encoded by nucleotides 3592-4347 of SEQ ID NO: 274 (herein termed epsE2;
   [0640] (8): a nucleotide sequence having at least 70%, preferably at least 85%, more preferably at least 95%, even more preferably at least 98%, and most preferably 100% identity with the amino acid sequence encoded by nucleotides 6310-7224 of the complementary strand of SEQ ID NO: 274 (herein termed epsL);

[0641] The above sequences are all present in the conserved part of the eps gene cluster of the strains of the present invention.

[0642] Even more preferably, the Lactococcus lactic lactic acid bacteria of the present invention comprises an active eps gene cluster capable of producing exopolysaccharide (EPS), wherein the eps gene cluster has the following sequence:
[0643] (i) SEQ ID NO:91;
[0644] (ii) SEQ ID NO:199;
[0645] (iii) SEQ ID NO:92;
[0646] (iv) SEQ ID NO:223;
[0647] (v) SEQ ID NO:224;
[0648] (vi) SEQ ID NO:221;
[0649] (vii) SEQ ID NO:244;
[0650] (viii) SEQ ID NO:222;
[0651] (ix) SEQ ID NO:257;
[0652] (x) SEQ ID NO:274.

[0653] Most preferably, the Lactococcus lactic lactic acid bacteria of the present invention are the following texturing strains:
[0654] (i): DSM 33134
[0655] (ii): DSM 33135
[0656] (iii): DSM 33136
[0657] (iv): DSM 33137
[0658] (v): DSM 33138
[0659] (vi): DSM 33139
[0660] (vii): DSM 33140
[0661] (viii): DSM 33141
[0662] (ix): DSM 33142
[0663] (x): DSM 33183.

[0664] The eps gene cluster of DSM 33134 comprises the following genes in the variable and conserved parts:
[0665] Variable part: wzy (SEQ ID NO.: 11), wzx (SEQ ID NO.: 17), gene coding GT1 (SEQ ID NO.:9), gene coding GT2 (SEQ ID NO.:13) gene coding GT3 (SEQ ID NO.:15) and gene coding a nucleotide sugar dehydrogenase protein (SEQ ID NO.: 23).
[0666] Conserved part: epsR (SEQ ID NO.: 1), epsX (SEQ ID NO.: 3), epsB (SEQ ID NO.: 5), epsD (SEQ ID NO.: 7), epsL (SEQ ID NO.: 19), gene coding LytR protein (SEQ ID NO.: 21), epsC (SEQ ID NO.: 25) and epsE (SEQ ID NO.: 27).

[0667] The eps gene cluster of DSM 33136 comprises the following genes in the variable and conserved parts:
[0668] Variable part: wzy (SEQ ID NO.: 39), wzx (SEQ ID NO.: 45), gene coding GT1 (SEQ ID NO.:37), gene coding GT2 (SEQ ID NO.:41), gene coding GT3 (SEQ ID NO.:43) and gene coding a polysaccharide pyruvyl transferase family protein (SEQ ID NO.: 51).
[0669] Conserved part: epsR (SEQ ID NO.: 29), epsX (SEQ ID NO.: 31), epsB (SEQ ID NO.: 33), epsD (SEQ ID NO.: 35), epsL (SEQ ID NO.: 47), gene coding LytR protein (SEQ ID NO.: 49), epsC (SEQ ID NO.: 25) and epsE (SEQ ID NO.: 27).

[0670] The eps gene cluster of DSM 33139 comprises the following genes in the variable and conserved parts:
[0671] Variable part: gene coding GT1 (SEQ ID NO.:65), gene coding NAD-dependent epimerase/dehydratase protein 1 (SEQ ID NO.:93), gene coding nucleotide sugar dehydrogenase protein (SEQ ID NO.:79), gene coding glucose-1-phosphate thymidylyltransferase RfbA protein (SEQ ID NO.:95), gene coding dTDP-glucose 4,6-dehydratase protein (SEQ ID NO.:97), gene coding dTDP-4-dehydrorhamnose 3,5-epimerase protein (SEQ ID NO.:99), gene coding NAD-dependent epimerase/dehydratase protein 2 (SEQ ID NO.:101), gene coding GT2 (SEQ ID NO.:69), gene coding GT3 (SEQ ID NO.:71), gene coding GT4 (SEQ ID NO.:85), gene coding GT5 (SEQ ID NO.:87), gene coding GT6 (SEQ ID NO.:89), wzy (SEQ ID NO.:67), gene coding acyltransferase protein 1 (SEQ ID NO.:111), wzx (SEQ ID NO.:73), gene coding acyltransferase protein 2 (SEQ ID NO.:107), gene coding dTDP-4-dehydrorhamnose reductase (SEQ ID NO.:103), gene coding nucleotidyl transferase (SEQ ID NO.:105).
[0672] Conserved part: epsR (SEQ ID NO.: 57), epsX (SEQ ID NO.: 59), epsB (SEQ ID NO.: 61), epsD (SEQ ID NO.: 63), epsL (SEQ ID NO.: 75), gene coding LytR protein (SEQ ID NO.: 77), epsC (SEQ ID NO.: 81) and epsE (SEQ ID NO.: 83).

[0673] The eps gene cluster of DSM 33141 comprises the following genes in the variable and conserved parts:
[0674] Variable part: gene coding GT1 (SEQ ID NO.:121), gene coding nucleotide sugar dehydrogenase protein (SEQ ID NO.:135), gene coding GT2 (SEQ ID NO.:125), gene coding GT3 (SEQ ID NO.:127), gene coding GT4 (SEQ ID NO.:143), gene coding GT5 (SEQ ID NO.:145), gene coding GT6 (SEQ ID NO.:147), wzy (SEQ ID NO.:123), gene coding acetyltransferase protein (SEQ ID NO.:149), wzx (SEQ ID NO.:129), gene coding acyltransferase protein (SEQ ID NO.:151).
[0675] Conserved part: epsR (SEQ ID NO.: 113), epsX (SEQ ID NO.: 115), epsB (SEQ ID NO.: 117), epsD (SEQ ID NO.: 119), epsL (SEQ ID NO.: 131), gene coding LytR protein (SEQ ID NO.: 133), epsC (SEQ ID NO.: 137), epsE1 (SEQ ID NO.: 139) and epsE2 (SEQ ID NO.: 141).

[0676] The eps gene cluster of DSM 33137 comprises the following genes in the variable and conserved parts:
[0677] Variable part: gene coding GT1 (SEQ ID NO.:161), gene coding GT2 (SEQ ID NO.:165), gene coding GT3 (SEQ ID NO.:167), gene coding GT4 (SEQ ID NO.:181), wzy (SEQ ID NO.:163), wzx (SEQ ID NO.:169), gene coding Core-2/I-Branching protein (SEQ ID NO.:175).
[0678] Conserved part: epsR (SEQ ID NO.: 153), epsX (SEQ ID NO.: 155), epsB (SEQ ID NO.: 157), epsD (SEQ ID NO.: 159), epsL (SEQ ID NO.: 171), gene coding LytR protein (SEQ ID NO.: 173), epsC (SEQ ID NO.: 177) and epsE (SEQ ID NO.: 179).

[0679] The eps gene cluster of DSM 33135 comprises the following genes in the variable and conserved parts:
[0680] Variable part: gene coding GT1 (nucleotides 4174-4824 of SEQ ID NO:199), gene coding GT2 (nucleotides 7276-8508 of SEQ ID NO:199), gene coding GT3 (nucleotides 11042-12391 of SEQ ID NO:199), gene coding GT4 (nucleotides 13008-13934 of SEQ ID NO:199), gene coding GT5 (nucleotides 18528-19508 of SEQ ID NO:199), wzy (nucleotides 13939-15042 of SEQ ID NO:199), wzx (nucleotides 26029-27444 of the complementary strand of SEQ ID NO:199), gene coding dTDP-glucose 4,6-dehydratase protein (nucleotides 4784-5695 of SEQ ID NO:199), gene coding dTDP-4-dehydrorhamnose reductase protein (nucleotides 5717-6631 of SEQ ID NO:199), gene coding dTDP-4-dehydrorhamnose 3,5-epimerase protein (nucleotides 6586-7257 of SEQ ID NO:199), gene coding DUF1919 protein (nucleotides 8515-9144 of SEQ ID NO:199), gene coding UDP-galactopyranose mutase protein (nucleotides 9159-10274 of SEQ ID NO:199), gene coding DUF4422 protein (nucleotides 10271-11029 of SEQ ID NO:199).
[0681] Conserved part: epsR (nucleotides 1-318 of SEQ ID NO:199), epsX (nucleotides 352-1119 of SEQ ID NO:199), epsB (nucleotides 2698 to 3462 of SEQ ID NO:199), epsD (nucleotides 1948-2640 of SEQ ID NO:199), epsL (nucleotides 24053-24751 of the complementary strand of SEQ ID NO:199), gene coding LytR protein (nucleotides 20389-21291 of SEQ ID NO:199), epsC (nucleotides 1159 to 1938 of SEQ ID NO:199) and epsE (nucleotides 3484-4170 of SEQ ID NO:199).

[0682] The eps gene cluster of DSM 33138 comprises the following genes in the variable and conserved parts:
[0683] Variable part: gene coding GT1 (nucleotides 4174-4824 of SEQ ID NO: 224), gene coding GT2 (nucleotides 11042-12391 of SEQ ID NO: 224), gene coding GT3 (nucleotides 13008-13934 of SEQ ID NO: 224), gene coding GT4 (nucleotides 18527-19507 of SEQ ID NO: 224), wzy (nucleotides 13939-15042 of SEQ ID NO: 224), gene coding DUF1972 protein (nucleotides 7276-8508 of SEQ ID NO: 224), gene coding dTDP-4-dehydrorhamnose reductase protein (nucleotides 5717-6631 of SEQ ID NO:199), gene coding DUF4422 protein (nucleotides 6586-7257 of SEQ ID NO:199), gene coding DUF1919 protein (nucleotides 8515-9144 of SEQ ID NO:199), gene coding UDP-galactopyranose mutase protein (nucleotides 9159-10274 of SEQ ID NO: 224), gene coding DUF4422 protein (nucleotides 10271-11029 of SEQ ID NO: 224), gene coding DUF1919 protein (nucleotides 8515-9144 of SEQ ID NO: 224), gene coding dTDP-4-dehydrorhamnose_3,5-epimerase protein (nucleotides 6586-7257 of SEQ ID NO: 224), gene coding dTDP-glucose 4,6-dehydratase protein (nucleotides 4784-5695 of SEQ ID NO: 224), and gene coding dTDP-4-dehydrorhamnose reductase protein (nucleotides 5717-6631 of SEQ ID NO: 224).
[0684] Conserved part: epsR (nucleotides 1-318 of SEQ ID NO: 224), epsX (nucleotides 352-1119 of SEQ ID NO: 224), epsB (nucleotides 2698-3462 of SEQ ID NO: 224), epsD (nucleotides 1948-2640 of SEQ ID NO: 224), gene coding LytR protein (nucleotides 20388-21290 of SEQ ID NO: 224), epsC (nucleotides 1159-1938 of SEQ ID NO: 224) and epsE (nucleotides 3484-4170 of SEQ ID NO: 224).

[0685] The eps gene cluster of DSM 33140 comprises the following genes in the variable and conserved parts:
[0686] Variable part: gene coding GT1 (nucleotides 4617-5123 of SEQ ID NO: 244), gene coding GT2 (nucleotides 5120-5827 of SEQ ID NO: 244), wzy (nucleotides 5833-6927 of SEQ ID NO: 244), gene coding dTDP-4-dehydrorhamnose reductase protein (nucleotides 5717-6631 of SEQ ID NO:199), gene coding UDP-N-acetylglucosamine-LPS N-acetylglucosannine_transferaseprotein (nucleotides 4168-4617 of SEQ ID NO: 244).
[0687] Conserved part: epsR (nucleotides 1-318 of SEQ ID NO: 244), epsX (nucleotides 352-1119 of SEQ ID NO: 244), epsB (nucleotides 2698-3462 of SEQ ID NO: 244), epsD (nucleotides 1948-2643 of SEQ ID NO: 244), epsL (nucleotides 8438-9340 of SEQ ID NO: 244), gene coding LytR protein (nucleotides 9365-10267 of the complementary strand of SEQ ID NO: 244), epsC (nucleotides 1159-1938 of SEQ ID NO: 244) and epsE (nucleotides 3484-4164 of SEQ ID NO: 244).

[0688] The eps gene cluster of DSM 33142 comprises the following genes in the variable and conserved parts:
[0689] Variable part: gene coding GT1 (nucleotides 9726-10673 of the complementary strand of SEQ ID NO: 257), gene coding GT2 (nucleotides 12336-13421 of the complementary strand of SEQ ID NO: 257), gene coding GT3 (nucleotides 13418-14260 of the complementary strand of SEQ ID NO: 257), wzy (nucleotides 11201-12349 of the complementary strand of SEQ ID NO: 257), wzx (nucleotides 15538-16953 of the complementary strand of SEQ ID NO: 257), gene coding nucleotide sugar dehydrogenase protein (nucleotides 7727-8173 of the complementary strand of SEQ ID NO: 257) and gene coding acetyltransferase protein (nucleotides 10657-11211 of the complementary strand of SEQ ID NO: 257).
[0690] Conserved part: epsR (nucleotides 1-318 of SEQ ID NO: 257), epsX (nucleotides 407-1120 of SEQ ID NO: 257), epsB (nucleotides 2699-3463 of SEQ ID NO: 257), epsD (nucleotides 1949-2644 of SEQ ID NO: 257), epsL (nucleotides 6803-7717 of the complementary strand of SEQ ID NO: 257), gene coding LytR protein (nucleotides 5876-6778 of SEQ ID NO: 257), epsC (nucleotides 1160-1939 of SEQ ID NO: 257), epsE1 (nucleotides 3485-4084 of SEQ ID NO: 257) and epsE2 (nucleotides 4085-4840 of SEQ ID NO: 257).

[0691] The eps gene cluster of DSM 33183 comprises the following genes in the variable and conserved parts:
[0692] Variable part: gene coding GT1 (nucleotides 9232-10179 of the complementary strand of SEQ ID NO: 274), gene coding GT2 (nucleotides 11833-12918 of the complementary strand of SEQ ID NO: 274), gene coding GT3 (nucleotides 12915-13757 of the complementary strand of SEQ ID NO: 274), wzy (nucleotides 10707-11846 of the complementary strand of SEQ ID NO: 274), wzx (nucleotides 15037-16476 of the complementary strand of SEQ ID NO: 274), gene coding nucleotide sugar dehydrogenase protein (nucleotides 7234-7680 of the complementary strand of SEQ ID NO: 274) and gene coding acetyltransferase protein (nucleotides 10163-10717 of the complementary strand of SEQ ID NO: 274).
[0693] Conserved part: epsR (nucleotides 1-318 of SEQ ID NO: 274), epsB (nucleotides 2220-3005 of SEQ ID NO: 274), epsD (nucleotides 1470-2165 of SEQ ID NO: 274), epsL (nucleotides 6310-7224 of the complementary strand of SEQ ID NO: 274), gene coding LytR protein (nucleotides 5383-6285 of SEQ ID NO: 274), epsC (nucleotides 681-1460 of SEQ ID NO: 274), epsE1 (nucleotides 2992-3591 of SEQ ID NO: 274) and epsE2 (nucleotides 3592-4347 of SEQ ID NO: 274.

[0694] The term “exopolysaccharide (EPS)” is well known and the skilled person can routinely determine if a lactic acid bacterium of interest produces EPS. As known and understood by the skilled person a lactic acid bacterium of interest, which produces EPS, will comprise an active eps gene cluster.

[0695] As known to the skilled person, as described above, an active eps gene cluster comprises genes involved in regulation and modulation of EPS biosynthesis and genes involved in the biosynthesis of an oligosaccharide repeat unit and export, including a glycosyltransferase (GT), a polymerase and a transporter. In short and as understood by the skilled person, since the lactic acid bacterium strains of the first aspect are capable of producing and exporting exopolysaccharide (EPS), then they will comprise an active eps gene cluster. Zeidan et al., 2017 reviews the production of EPS by LAB, and provide details of the structure of eps gene clusters in LAB.

[0696] Preferably, the Lactococcus lactic lactic acid bacterium (LAB) strain comprising an active eps gene cluster capable of producing exopolysaccharide (EPS), wherein the eps gene cluster comprises at least one, preferably two, more preferably three nucleotide sequence selected from the nucleotide sequences (a), (b) and (c), even more preferably all of the nucleotide sequences (a) to (d), as defined in (i), and preferably at least one, preferably all of the nucleotide sequences selected from the nucleotide sequences (1)-(8) as defined in (i) is the strain DSM 33134, or a mutant or a variant thereof.

[0697] Preferably, the Lactococcus lactis lactic acid bacterium (LAB) strain comprising an active eps gene cluster capable of producing exopolysaccharide (EPS), wherein the eps gene cluster comprises at least one, preferably two, more preferably three nucleotide sequence selected from the nucleotide sequences (a) to (c5), even more preferably all of the nucleotide sequences (a) to (i), as defined in (ii), and preferably at least one, preferably all of the nucleotide sequences selected from the nucleotide sequences (1)-(8) as defined in (ii) is the strain DSM 33135, or a mutant or a variant thereof.

[0698] Preferably, the Lactococcus lactis lactic acid bacterium (LAB) strain comprising an active eps gene cluster capable of producing exopolysaccharide (EPS), wherein the eps gene cluster comprises at least one, preferably two, more preferably three nucleotide sequence selected from the nucleotide sequences (a) to (d), preferably all of the nucleotide sequences (a) to (c3), and even more preferably all of the nucleotide sequences (a) to (d), as defined in (iii), and preferably at least one, preferably all of the nucleotide sequences selected from the nucleotide sequences (1)-(8) as defined in (iii) is the strain DSM 33136 or a mutant or a variant thereof.

[0699] Preferably, the Lactococcus lactis lactic acid bacterium (LAB) strain comprising an active eps gene cluster capable of producing exopolysaccharide (EPS), wherein the eps gene cluster comprises at least one, preferably two, more preferably three nucleotide sequence selected from the nucleotide sequences (a)-(d) preferably all of the nucleotide sequences (a) to (c4), even more preferably all of the nucleotide sequences (a) to (d), as defined in (iv), and preferably at least one, preferably all of the nucleotide sequences selected from the nucleotide sequences (1)-(8) as defined in (iv) is the strain DSM 33137 or a mutant or a variant thereof.

[0700] Preferably, the Lactococcus lactis lactic acid bacterium (LAB) strain comprising an active eps gene cluster capable of producing exopolysaccharide (EPS), wherein the eps gene cluster comprises at least one, preferably two, more preferably three nucleotide sequence selected from the nucleotide sequences (a) to (c4), preferably all of the nucleotide sequences (a) to (j), as defined in (v), and preferably at least one, preferably all of the nucleotide sequences selected from the nucleotide sequences (1)-(7) as defined in (v) is the strain DSM 33138 or a mutant or a variant thereof.

[0701] Preferably, the Lactococcus lactis lactic acid bacterium (LAB) strain comprising an active eps gene cluster capable of producing exopolysaccharide (EPS), wherein the eps gene cluster comprises at least one, preferably two, more preferably three nucleotide sequence selected from the nucleotide sequences (a)-(m), preferably all of the nucleotide sequences (a) to (c6), even more preferably all of the nucleotide sequences (a) to (m), as defined in (vi), and preferably at least one, preferably all of the nucleotide sequences selected from the nucleotide sequences (1)-(8) as defined in (vi) is the strain DSM 33139 or a mutant or a variant thereof.

[0702] Preferably, the Lactococcus lactis lactic acid bacterium (LAB) strain comprising an active eps gene cluster capable of producing exopolysaccharide (EPS), wherein the eps gene cluster comprises at least one, preferably two, more preferably three nucleotide sequence selected from the nucleotide sequences (a) to (c2), even more preferably all of the nucleotide sequences (a) to (d), as defined in (vii), and preferably at least one, preferably all of the nucleotide sequences selected from the nucleotide sequences (1)-(8) as defined in (vii) is the strain DSM 33140 or a mutant or a variant thereof.

[0703] Preferably, the Lactococcus lactis lactic acid bacterium (LAB) strain comprising an active eps gene cluster capable of producing exopolysaccharide (EPS), wherein the eps gene cluster comprises at least one, preferably two, more preferably three nucleotide sequence selected from the nucleotide sequences (a)-(f), preferably all of the nucleotide sequences (a) to (c6), even more preferably all of the nucleotide sequences (a) to (f), as defined in (viii), and preferably at least one, preferably all of the nucleotide sequences selected from the nucleotide sequences (1)-(9) as defined in (viii) is the strain DSM 33141 or a mutant or a variant thereof.

[0704] Preferably, the Lactococcus lactis lactic acid bacterium (LAB) strain comprising an active eps gene cluster capable of producing exopolysaccharide (EPS), wherein the eps gene cluster comprises at least one, preferably two, more preferably three nucleotide sequence selected from the nucleotide sequences (a) to (e), more preferably all of the nucleotide sequences (a) to (c3), even more preferably all of the nucleotide sequences (a) to (e), as defined in (x), and preferably at least one, preferably all of the nucleotide sequences selected from the nucleotide sequences (1)-(9) as defined in (ix) is the strain DSM 33142 or a mutant or a variant thereof.

[0705] Preferably, the Lactococcus lactis lactic acid bacterium (LAB) strain comprising an active eps gene cluster capable of producing exopolysaccharide (EPS), wherein the eps gene cluster comprises at least one, preferably two, more preferably three nucleotide sequence selected from the nucleotide sequences (a) to (e), even more preferably all of the nucleotide sequences (a) to (c3), even more preferably all of the nucleotide sequences (a) to (e), as defined in (xi), and preferably at least one, preferably all of the nucleotide sequences selected from the nucleotide sequences (1)-(8) as defined in (x) is the strain DSM 33183 or a mutant or a variant thereof.

[0706] As discussed in working examples herein (see, e.g., Table 1)—the herein disclosed novel Lactococcus lactis strains have excellent texturing properties. In addition, as shown in Example 2 and Tables 2 and 3, the herein disclosed novel Lactococcus lactis strains also have excellent texturing properties in plant-based milk, in particular in soy milk supplemented with glucose, such as 0.5-5% glucose, preferably 0.5-2% glucose, more preferably about 2% glucose.

[0707] Preferably, the texturing lactic acid bacterium strains (i) to (x) as described herein is a LAB strain which generates fermented milks having a shear stress greater than 40 Pa, such as about 41 Pa, 42 Pa, 43 Pa, 44 Pa, 45 Pa, 46 Pa or more, preferably the LAB strain generates fermented milk having a shear stress of 41 Pa or more, such as about 41 Pa, 48 Pa, 52 Pa, 53 Pa, 55 Pa, 56 Pa, 60 Pa, 64 Pa, 65 Pa or 67 Pa, preferably in the presence of co-acidifier or helper strain, which is preferably selected from DSM 25485, DSM 33192 and/or DSM 33133, even more preferably in the presence of DSM 25485, measured at shear rate 300 s⁻¹, under the following conditions:

[0708] 200 ml semi-fat milk (1.5% fat) is heated to 90° C. for 20 min, followed by cooling to inoculation temperature, and inoculated with 2 ml of an overnight culture of the lactic acid bacterium strain, and left at inoculation temperature until pH 4.55, followed by storage at 4° C. until shear stress is measured, typically from 1-7 days, such as for 5 days, followed by gently stirring and measuring the shear stress at shear rate 300 s⁻¹, wherein the inoculation temperature is 30° C. The shear stress is measured using the method indicated in Example 1.

[0709] Without being limited to theory, not all of the strains are able to acidify milk in 15 h or less, i.e., to reach a target pH—e.g. pH 4.55 in 15 h or less, measured as follows: 200 ml semi-fat milk (1.5% fat) is heated to 90° C. for 20 min, followed by cooling to inoculation temperature, and inoculated with 2 ml of an overnight culture of the lactic acid bacterium strain, and left at inoculation temperature until the target pH is reached. Target pH may be e.g. pH between 4 and 5, preferably between pH 4.3 to 4.7, more preferably between pH 4.4 to 4.6, and even more preferably pH 4.45, pH 4.50, or pH 4.55. The inoculation temperature is 30° C.

[0710] These strains may be referred to as “slow-acidifying” strains”. For instance, as shown in Table 1, the following strains may be considered to be “slow-acidifying” strains: DSM 33134, 33135, DSM 33136, 33138, 33139, 33141 and 33183.

[0711] For the production of fermented milks, it is currently preferred that milk fermentation (acidification) occurs as fast as possible, e.g., in order to avoid the growth of any potential contaminant microorganism. Accordingly, it is preferred that the slow-acidifying strains are used in combination with a further lactic acid bacterium strain, which, in the context of the present invention, is referred to as “co-acidifier” or “helper” strain. The co-acidifier or helper strain would help the “slow-acidifying” strains to acidify milk in lower amount of time. Without being limited to theory, it is currently believed that the co-acidifier or helper strain would inter alia metabolize the proteins present in milk (casein) faster than the “slow-acidifying” strain, so that the “slow-acidifying” strain would have more available nitrogen source for their growth, which would then be facilitated. LAB require an exogenous source of amino acids or peptides, which are provided by the proteolysis of milk proteins, e.g., casein, which the most abundant protein in milk and the main source of amino acids (Savijoki, K., et al., Appl Microbiol Biotechnol (2006) 71: 394-406).

[0712] Slow-acidifying strains are often associated with low proteolytic activity. Proteolysis is the breakdown of proteins into smaller polypeptides or amino acids. A cell wall proteinase (Prt) hydrolyses milk proteins, such as casein, providing a nitrogen source, which makes milk suitable for rapid growth of strains. Other factors than the prt activity, such as carbon metabolism, ldh and codY activities can also play a role. It is not enough to have high prt activity to acidify milk fast. Uptake and further degradation of peptides are also important for the milk acidification rate. Moreover, EPS production is a highly energy demanding process (Zeidan et al., 2017). Texturing L. lactis strains are generally slower in acidifying milk than the non-texturing strains (Poulsen et al., 2019).

[0713] Strains which are able to acidify milk in about 15 h or less may be referred to as “fast-acidifying” strains, i.e., strains which are able to reach target pH in 15 h or less, measured as follows: 200 ml semi-fat milk (1.5% fat) is heated to 90° C. for 20 min, followed by cooling to inoculation temperature, and inoculated with 2 ml of an overnight culture of the lactic acid bacterium strain, and left at inoculation temperature until the target pH is reached. The inoculation temperature is 30° C. Target pH may be e.g. pH between 4 and 5, preferably between pH 4.3 to 4.7, more preferably between pH 4.4 to 4.6, and even more preferably pH 4.45, pH 4.50, or pH 4.55.

[0714] These strains may be used on their own or in combination with other strains for the generation of fermented milks. For instance, the following strains may be considered as “fast-acidifying” strains: DSM 33137, 33140 and 33142.

[0715] The co-acidifier or helper strain according with the present invention may be any lactic acid bacterium strain which is able to:
[0716] i) generate fermented milks with a pH of about 4.55 in 15 h or less, preferably in 12 h or less, measured under the following conditions:
[0717] 200 ml semi-fat milk (1.5% fat) is heated to 90° C. for 20 min, followed by cooling to inoculation temperature (30° C.), and inoculated with 2 ml of an overnight culture of the lactic acid bacterium strain, and left at inoculation temperature until a pH of about 4.55 is reached. Therefore, the “time-to-pH 4.55” can be calculated for a certain lactic acid bacterium strain; and
[0718] ii) generate fermented milks having a shear stress of 40 Pa or more measured at shear rate 300 s⁻¹, measured under following conditions:
[0719] 200 ml semi-fat milk (1.5% fat) is heated to 90° C. for 20 min, followed by cooling to inoculation temperature, and inoculated with 2 ml of an overnight culture of the lactic acid bacterium strain, and left at inoculation temperature until pH 4.55, time to pH 4.55) followed by storage at 4° C. for 5 days, followed by gently stirring and measuring the shear stress at shear rate 300 s⁻¹, wherein the inoculation temperature is 30° C.

[0720] In a preferred embodiment, the co-acidifier or helper strain is a lactic acid bacterium strain Lactococcus lactic comprising an active eps gene cluster capable of producing exopolysaccharide (EPS), wherein the eps gene cluster comprises the nucleotide sequences (a), (b) and (c) ((a) to (c4)) as defined in (xi):
[0721] (xi) (a): a nucleotide sequence encoding a polypeptide having polymerase activity and having at least 95% identity with the amino acid sequence encoded by nucleotides 6955-8145 of SEQ ID NO: 183 (herein termed wzy);
   [0722] (b): a nucleotide sequence encoding a polypeptide having polysaccharide transporter activity and having at least 95% identity with the amino acid sequence encoded by nucleotides 9309-10727 of SEQ ID NO: 183 (herein termed wzx); and
   [0723] (c): a nucleotide sequence encoding a polypeptide having glycosyltransferase (GT) activity comprising:
   [0724] (c1): a nucleotide sequence having at least 95% identity with the amino acid sequence encoded by nucleotides 4008-4478 of SEQ ID NO: 183 (herein termed GT1);
   [0725] (c2): a nucleotide sequence having at least 95% identity with the amino acid sequence encoded by nucleotides 4478-4960 of SEQ ID NO: 183 (herein termed GT2);
   [0726] (c3): a nucleotide sequence having at least 95% identity with the amino acid sequence encoded by nucleotides 5015-5965 of SEQ ID NO: 183 (herein termed GT3); and
   [0727] (c4): a nucleotide sequence having at least 95% identity with the amino acid sequence encoded by nucleotides 6026-6955 of SEQ ID NO: 183 (herein termed GT4).

[0728] In a further preferred embodiment, a lactic acid bacterium strain Lactococcus lactis comprising an active eps gene cluster capable of producing exopolysaccharide (EPS), wherein the eps gene cluster is as defined in (xii):
[0729] (xii) SEQ ID NO.: 290.

[0730] The skilled person would be able to find further co-acidifier or helper strains suitable for the present invention. For instance, a suitable co-acidifier or helper strain may be a lactic acid bacterium strain Lactococcus lactis comprising an active eps gene cluster capable of producing exopolysaccharide (EPS), wherein the eps gene cluster is as defined in SEQ ID NO.: 291-294 wherein the co-acidifier or helper strain is able to (i) generate fermented milks with a pH of about 4.55 in about 15 h or less, preferably in about 12 h or less, measured as described above, and is able to (ii) generate fermented milks having a shear stress of 40 Pa or more measured at shear rate 300 s⁻¹, measured as described above.

[0731] For instance, the following strains may also be used as co-acidifier or helper strains in the context of the present invention: strains DSM 33193, DSM 33133, DSM 33196, DSM 33197, DSM 33200, DSM 33201, DSM 33203, DSM 33204, DSM 33205, DSM 33218, DSM 33219, DSM 33220, DSM 33221, DSM 33222, DSM 33224, DSM 33225, DSM 33140, DSM 33142 and/or DSM 33137, preferably strains DSM 33193, DSM 33196, DSM 33197, DSM 33200, DSM 33201, DSM 33205, DSM 33218, DSM 33220, DSM 33221, DSM 33222, DSM 33224, DSM 33225, and/or DSM 33137.

[0732] Accordingly, the present invention further provides the use of any one of strains DSM 33193, DSM 33133, DSM 33196, DSM 33197, DSM 33200, DSM 33201, DSM 33203, DSM 33204, DSM 33205, DSM 33218, DSM 33219, DSM 33220, DSM 33221, DSM 33222, DSM 33224, DSM 33225, DSM 33140, DSM 33142 and/or DSM 33137, preferably the use of any one of strains DSM 33193, DSM 33196, DSM 33197, DSM 33200, DSM 33201, DSM 33205, DSM 33218, DSM 33220, DSM 33221, DSM 33222, DSM 33224, DSM 33225, and/or DSM 33137 as a co-acidifier or helper strain.

[0733] In addition, the texturing lactic acid bacterium strains (i) to (x) as described herein is a LAB strain which generates fermented milks having a shear stress greater than 24 Pa, such as about 27 Pa, 28 Pa, 29 Pa, 30 Pa, 32 Pa, 35 Pa, 37 Pa, 42 Pa, 47 Pa, 54 Pa, 59 Pa or more, measured at shear rate 300 s⁻¹, under the following conditions:

[0734] 200 ml of soy milk supplemented with 2% glucose (as described in Example 2) are inoculated with 2 ml of an overnight culture of the lactic acid bacterium strain, and left at inoculation temperature until pH^{˜}4.55 (or higher, if a strain stops acidifying at a higher pH, se Table 3, such as pH 4.55, 4.48, 4.71, 4.64, 4.68, 4.58, 4.4, 4.56, 4.58 or 4.86), followed by storage at 4° C. until shear stress is measured, typically from 1-7 days, such as for 5 days, followed by gently stirring and measuring the shear stress at shear rate 300 s⁻¹, wherein the inoculation temperature is 30° C. The shear stress is measured using the method indicated in Example 2.

[0735] For example, the texturing lactic acid bacterium strain (i), which is preferably Lactococcus lactis strain DSM 33134, or a mutant or a variant therefrom, generates fermented milks having a shear stress greater than 40 Pa, preferably greater than 45 Pa, such as about 46 Pa, measured at shear rate 300 s⁻¹, under the following conditions:

[0736] 200 ml semi-fat milk (1.5% fat) is heated to 90° C. for 20 min, followed by cooling to inoculation temperature, and inoculated with 2 ml of an overnight culture of the lactic acid bacterium strain, and left at inoculation temperature until pH 4.55, followed by storage at 4° C. until shear stress is measured, typically from 1-7 days, such as for 5 days, followed by gently stirring and measuring the shear stress at shear rate 300 s⁻¹, wherein the inoculation temperature is 30° C. The shear stress is measured using the method indicated in Example 1.

[0737] The texturing lactic acid bacterium strain (i), which is preferably Lactococcus lactis strain DSM 33134, or a mutant or a variant therefrom, generates fermented milks having a shear stress greater than 45 Pa, preferably greater than 50 Pa, such as about 53 Pa, in the presence of the co-acidifier strain DSM 25485, preferably in a ratio of about 9:1 (LAB of (i): LAB strain DSM 25485), at shear rate 300 s⁻¹, under the following conditions:

[0738] 200 ml semi-fat milk (1.5% fat) is heated to 90° C. for 20 min, followed by cooling to inoculation temperature, and inoculated with 2 ml of an overnight culture of the lactic acid bacterium strain, and left at inoculation temperature until pH 4.55, followed by storage at 4° C. until shear stress is measured, typically from 1-7 days, such as for 5 days, followed by gently stirring and measuring the shear stress at shear rate 300 s⁻¹, wherein the inoculation temperature is 30° C. The shear stress is measured using the method indicated in Example 1.

[0739] For example, the texturing lactic acid bacterium strain (i), which is preferably Lactococcus lactis strain DSM 33134, or a mutant or a variant therefrom, generates fermented milks having a shear stress greater than 24 Pa, preferably greater than 30 Pa, such as about 37 Pa, measured at shear rate 300 s⁻¹, under the following conditions:

[0740] 200 ml of soy milk supplemented with 2% glucose (as described in Example 2) are inoculated with 2 ml of an overnight culture of the lactic acid bacterium strain, and left at inoculation temperature until pH 4.56, followed by storage at 4° C. until shear stress is measured, typically from 1-7 days, such as for 5 days, followed by gently stirring and measuring the shear stress at shear rate 300 s⁻¹, wherein the inoculation temperature is 30° C. The shear stress is measured using the method indicated in Example 2.

[0741] For example, the texturing lactic acid bacterium strain (ii), which is preferably Lactococcus lactis strain DSM 33135, or a mutant or a variant therefrom, generates fermented milks having a shear stress greater than 40 Pa, such as about 43 Pa, measured at shear rate 300 s⁻¹, under the following conditions:

[0742] 200 ml semi-fat milk (1.5% fat) is heated to 90° C. for 20 min, followed by cooling to inoculation temperature, and inoculated with 2 ml of an overnight culture of the lactic acid bacterium strain, and left at inoculation temperature until pH 4.55, followed by storage at 4° C. until shear stress is measured, typically from 1-7 days, such as for 5 days, followed by gently stirring and measuring the shear stress at shear rate 300 s⁻¹, wherein the inoculation temperature is 30° C. The shear stress is measured using the method indicated in Example 1.

[0743] The texturing lactic acid bacterium strain (ii), which is preferably Lactococcus lactis strain DSM 33135, or a mutant or a variant therefrom, generates fermented milks having a shear stress greater than 45 Pa, preferably greater than 50 Pa, more preferably greater than 60 Pa, such as about 65 Pa, in the presence of the co-acidifier strain DSM 25485, preferably in a ratio of about 9:1 (LAB of (ii):LAB strain DSM 25485), at shear rate 300 s⁻¹, under the following conditions:

[0744] 200 ml semi-fat milk (1.5% fat) is heated to 90° C. for 20 min, followed by cooling to inoculation temperature, and inoculated with 2 ml of an overnight culture of the lactic acid bacterium strain, and left at inoculation temperature until pH 4.55, followed by storage at 4° C. until shear stress is measured, typically from 1-7 days, such as for 5 days, followed by gently stirring and measuring the shear stress at shear rate 300 s⁻¹, wherein the inoculation temperature is 30° C. The shear stress is measured using the method indicated in Example 1.

[0745] For example, the texturing lactic acid bacterium strain (ii), which is preferably Lactococcus lactis strain DSM 33135, or a mutant or a variant therefrom, generates fermented milks having a shear stress greater than 24 Pa, such as about 30 Pa, measured at shear rate 300 s⁻¹, under the following conditions:

[0746] 200 ml of soy milk supplemented with 2% glucose (as described in Example 2) are inoculated with 2 ml of an overnight culture of the lactic acid bacterium strain, and left at inoculation temperature until pH 4.68, followed by storage at 4° C. until shear stress is measured, typically from 1-7 days, such as for 5 days, followed by gently stirring and measuring the shear stress at shear rate 300 s⁻¹, wherein the inoculation temperature is 30° C. The shear stress is measured using the method indicated in Example 2.

[0747] For example, the texturing lactic acid bacterium strain (iii), which is preferably Lactococcus lactis strain DSM 33136, or a mutant or a variant therefrom, generates fermented milks having a shear stress greater than 40 Pa, such as about 41 Pa, measured at shear rate 300 s⁻¹, under the following conditions:

[0748] 200 ml semi-fat milk (1.5% fat) is heated to 90° C. for 20 min, followed by cooling to inoculation temperature, and inoculated with 2 ml of an overnight culture of the lactic acid bacterium strain, and left at inoculation temperature until pH 4.55, followed by storage at 4° C. until shear stress is measured, typically from 1-7 days, such as for 5 days, followed by gently stirring and measuring the shear stress at shear rate 300 s⁻¹, wherein the inoculation temperature is 30° C. The shear stress is measured using the method indicated in Example 1.

[0749] The texturing lactic acid bacterium strain (iii), which is preferably Lactococcus lactis strain DSM 33136, or a mutant or a variant therefrom, generates fermented milks having a shear stress greater than 45 Pa, preferably greater than 50 Pa, more preferably greater than 55 Pa, such as about 60 Pa, in the presence of the co-acidifier strain DSM 25485, preferably in a ratio of about 9:1 (LAB of (iii):LAB strain DSM 25485), at shear rate 300 s⁻¹, under the following conditions:

[0750] 200 ml semi-fat milk (1.5% fat) is heated to 90° C. for 20 min, followed by cooling to inoculation temperature, and inoculated with 2 ml of an overnight culture of the lactic acid bacterium strain, and left at inoculation temperature until pH 4.55, followed by storage at 4° C. until shear stress is measured, typically from 1-7 days, such as for 5 days, followed by gently stirring and measuring the shear stress at shear rate 300 s⁻¹, wherein the inoculation temperature is 30° C. The shear stress is measured using the method indicated in Example 1.

[0751] For example, the texturing lactic acid bacterium strain (iii), which is preferably Lactococcus lactis strain DSM 33136, or a mutant or a variant therefrom, generates fermented milks having a shear stress greater than 24 Pa, such as about 21 Pa, measured at shear rate 300 s⁻¹, under the following conditions:

[0752] 200 ml of soy milk supplemented with 2% glucose (as described in Example 2) are inoculated with 2 ml of an overnight culture of the lactic acid bacterium strain, and left at inoculation temperature until pH 4.64, followed by storage at 4° C. until shear stress is measured, typically from 1-7 days, such as for 5 days, followed by gently stirring and measuring the shear stress at shear rate 300 s⁻¹, wherein the inoculation temperature is 30° C. The shear stress is measured using the method indicated in Example 2.

[0753] For example, the texturing lactic acid bacterium strain (iv), which is preferably Lactococcus lactis strain DSM 33137, or a mutant or a variant therefrom, generates fermented milks having a shear stress greater than 40 Pa, such as about 45 Pa, preferably greater than 45 Pa, such as about 48 Pa, measured at shear rate 300 s⁻¹, under the following conditions: 200 ml semi-fat milk (1.5% fat) is heated to 90° C. for 20 min, followed by cooling to inoculation temperature, and inoculated with 2 ml of an overnight culture of the lactic acid bacterium strain, and left at inoculation temperature until pH 4.55, followed by storage at 4° C. until shear stress is measured, typically from 1-7 days, such as for 5 days, followed by gently stirring and measuring the shear stress at shear rate 300 s⁻¹, wherein the inoculation temperature is 30° C. The shear stress is measured using the method indicated in Example 1.

[0754] The texturing lactic acid bacterium strain (iv), which is preferably Lactococcus strain DSM 33137, or a mutant or a variant therefrom, generates fermented milks having a shear stress greater than 45 Pa, such as about 48 Pa, in the presence of the co-acidifier strain DSM 25485, preferably in a ratio of about 9:1 (LAB of (iv):LAB strain DSM 25485), at shear rate 300 s⁻¹, under the following conditions:

[0755] 200 ml semi-fat milk (1.5% fat) is heated to 90° C. for 20 min, followed by cooling to inoculation temperature, and inoculated with 2 ml of an overnight culture of the lactic acid bacterium strain, and left at inoculation temperature until pH 4.55, followed by storage at 4° C. until shear stress is measured, typically from 1-7 days, such as for 5 days, followed by gently stirring and measuring the shear stress at shear rate 300 s⁻¹, wherein the inoculation temperature is 30° C. The shear stress is measured using the method indicated in Example 1.

[0756] For example, the texturing lactic acid bacterium strain (iv), which is preferably Lactococcus lactis strain DSM 33137, or a mutant or a variant therefrom, generates fermented milks having a shear stress greater than 24 Pa, such as about 30 Pa, preferably greater than 30 Pa, such as about 35 Pa, measured at shear rate 300 s⁻¹, under the following conditions: 200 ml of soy milk supplemented with 2% glucose (as described in Example 2) are inoculated with 2 ml of an overnight culture of the lactic acid bacterium strain, and left at inoculation temperature until pH 4.40, followed by storage at 4° C. until shear stress is measured, typically from 1-7 days, such as for 5 days, followed by gently stirring and measuring the shear stress at shear rate 300 s⁻¹, wherein the inoculation temperature is 30° C. The shear stress is measured using the method indicated in Example 2.

[0757] For example, the texturing lactic acid bacterium strain (v), which is preferably Lactococcus lactis strain DSM 33138, or a mutant or a variant therefrom, generates fermented milks having a shear stress greater than 45 Pa, preferably greater than 50 Pa, such as about 55 Pa, measured at shear rate 300 s⁻¹, under the following conditions:

[0758] 200 ml semi-fat milk (1.5% fat) is heated to 90° C. for 20 min, followed by cooling to inoculation temperature, and inoculated with 2 ml of an overnight culture of the lactic acid bacterium strain, and left at inoculation temperature until pH 4.55, followed by storage at 4° C. until shear stress is measured, typically from 1-7 days, such as for 5 days, followed by gently stirring and measuring the shear stress at shear rate 300 s⁻¹, wherein the inoculation temperature is 30° C. The shear stress is measured using the method indicated in Example 1.

[0759] The texturing lactic acid bacterium strain (v), which is preferably Lactococcus lactis strain DSM 33138, or a mutant or a variant therefrom, generates fermented milks having a shear stress greater than 45 Pa, preferably greater than 50 Pa, more preferably greater than 60 Pa, even more preferably greater than 65 Pa, such as about 67 Pa, in the presence of the co-acidifier strain DSM 25485, preferably in a ratio of about 9:1 (LAB of (v):LAB strain DSM 25485), at shear rate 300 s⁻¹, under the following conditions:

[0760] 200 ml semi-fat milk (1.5% fat) is heated to 90° C. for 20 min, followed by cooling to inoculation temperature, and inoculated with 2 ml of an overnight culture of the lactic acid bacterium strain, and left at inoculation temperature until pH 4.55, followed by storage at 4° C. until shear stress is measured, typically from 1-7 days, such as for 5 days, followed by gently stirring and measuring the shear stress at shear rate 300 s⁻¹, wherein the inoculation temperature is 30° C. The shear stress is measured using the method indicated in Example 1.

[0761] For example, the texturing lactic acid bacterium strain (v), which is preferably Lactococcus lactis strain DSM 33138, or a mutant or a variant therefrom, generates fermented milks having a shear stress greater than 24 Pa, such as about 27 Pa, measured at shear rate 300 s⁻¹, under the following conditions:

[0762] 200 ml of soy milk supplemented with 2% glucose (as described in Example 2) are inoculated with 2 ml of an overnight culture of the lactic acid bacterium strain, and left at inoculation temperature until pH 4.71, followed by storage at 4° C. until shear stress is measured, typically from 1-7 days, such as for 5 days, followed by gently stirring and measuring the shear stress at shear rate 300 s⁻¹, wherein the inoculation temperature is 30° C. The shear stress is measured using the method indicated in Example 2.

[0763] For example, the texturing lactic acid bacterium strain (vi), which is preferably Lactococcus lactis strain DSM 33139, or a mutant or a variant therefrom, generates fermented milks having a shear stress greater than 40 Pa, preferably greater than 45 Pa, more preferably greater 50 Pa, such as about 52 Pa, in the presence of the co-acidifier strain DSM 25485, preferably in a ratio of about 9:1 (LAB of (vi):LAB strain DSM 25485), at shear rate 300 s⁻¹, under the following conditions: 200 ml semi-fat milk (1.5% fat) is heated to 90° C. for 20 min, followed by cooling to inoculation temperature, and inoculated with 2 ml of an overnight culture of the lactic acid bacterium strain, and left at inoculation temperature until pH 4.55, followed by storage at 4° C. until shear stress is measured, typically from 1-7 days, such as for 5 days, followed by gently stirring and measuring the shear stress at shear rate 300 s⁻¹, wherein the inoculation temperature is 30° C. The shear stress is measured using the method indicated in Example 1.

[0764] For example, the texturing lactic acid bacterium strain (vi), which is preferably Lactococcus lactis strain DSM 33139, or a mutant or a variant therefrom, generates fermented milks having a shear stress greater than 24 Pa, preferably greater than 30 Pa, more preferably greater 35 Pa, such as about 42 Pa, at shear rate 300 s⁻¹, under the following conditions:

[0765] 200 ml of soy milk supplemented with 2% glucose (as described in Example 2) are inoculated with 2 ml of an overnight culture of the lactic acid bacterium strain, and left at inoculation temperature until pH 4.58, followed by storage at 4° C. until shear stress is measured, typically from 1-7 days, such as for 5 days, followed by gently stirring and measuring the shear stress at shear rate 300 s⁻¹, wherein the inoculation temperature is 30° C. The shear stress is measured using the method indicated in Example 2.

[0766] For example, the texturing lactic acid bacterium strain (vii), which is preferably Lactococcus lactis strain DSM 33140, or a mutant or a variant therefrom, generates fermented milks having a shear stress greater than 40 Pa, preferably greater than 45 Pa, such as about 46 Pa, measured at shear rate 300 s⁻¹, under the following conditions:

[0767] 200 ml semi-fat milk (1.5% fat) is heated to 90° C. for 20 min, followed by cooling to inoculation temperature, and inoculated with 2 ml of an overnight culture of the lactic acid bacterium strain, and left at inoculation temperature until pH 4.55, followed by storage at 4° C. until shear stress is measured, typically from 1-7 days, such as for 5 days, followed by gently stirring and measuring the shear stress at shear rate 300 s⁻¹, wherein the inoculation temperature is 30° C. The shear stress is measured using the method indicated in Example 1.

[0768] The texturing lactic acid bacterium strain (vii), which is preferably Lactococcus lactis strain DSM 33140, or a mutant or a variant therefrom, generates fermented milks having a shear stress greater than 45 Pa, preferably greater than 50 Pa, more preferably greater than 55 Pa, even more preferably greater than 60 Pa, such as about 64 Pa, in the presence of the co-acidifier strain DSM 25485, preferably in a ratio of about 9:1 (LAB of (vii):LAB strain DSM 25485), at shear rate 300 s⁻¹, under the following conditions:

[0769] 200 ml semi-fat milk (1.5% fat) is heated to 90° C. for 20 min, followed by cooling to inoculation temperature, and inoculated with 2 ml of an overnight culture of the lactic acid bacterium strain, and left at inoculation temperature until pH 4.55, followed by storage at 4° C. until shear stress is measured, typically from 1-7 days, such as for 5 days, followed by gently stirring and measuring the shear stress at shear rate 300 s⁻¹, wherein the inoculation temperature is 30° C. The shear stress is measured using the method indicated in Example 1.

[0770] For example, the texturing lactic acid bacterium strain (vii), which is preferably Lactococcus lactis strain DSM 33140, or a mutant or a variant therefrom, generates fermented milks having a shear stress greater than 24 Pa, such as about 28 Pa, measured at shear rate 300 s⁻¹, under the following conditions:

[0771] 200 ml of soy milk supplemented with 2% glucose (as described in Example 2) are inoculated with 2 ml of an overnight culture of the lactic acid bacterium strain, and left at inoculation temperature until pH 4.55, followed by storage at 4° C. until shear stress is measured, typically from 1-7 days, such as for 5 days, followed by gently stirring and measuring the shear stress at shear rate 300 s⁻¹, wherein the inoculation temperature is 30° C. The shear stress is measured using the method indicated in Example 2.

[0772] For example, the texturing lactic acid bacterium strain (viii), which is preferably Lactococcus lactis strain DSM 33141, or a mutant or a variant therefrom, texturing generates fermented milks having a shear stress greater than 40 Pa, such as about 41 Pa, in the presence of the co-acidifier strain DSM 25485, preferably in a ratio of about 9:1 (LAB of (viii):LAB strain DSM 25485), at shear rate 300 s⁻¹, under the following conditions:

[0773] 200 ml semi-fat milk (1.5% fat) is heated to 90° C. for 20 min, followed by cooling to inoculation temperature, and inoculated with 2 ml of an overnight culture of the lactic acid bacterium strain, and left at inoculation temperature until pH 4.55, followed by storage at 4° C. until shear stress is measured, typically from 1-7 days, such as for 5 days, followed by gently stirring and measuring the shear stress at shear rate 300 s⁻¹, wherein the inoculation temperature is 30° C. The shear stress is measured using the method indicated in Example 1.

[0774] For example, the texturing lactic acid bacterium strain (viii), which is preferably Lactococcus lactis strain DSM 33141, or a mutant or a variant therefrom, texturing generates fermented milks having a shear stress greater than 24 Pa, preferably greater than 30 Pa, such as about 32 Pa, at shear rate 300 s⁻¹, under the following conditions:

[0775] 200 ml of soy milk supplemented with 2% glucose (as described in Example 2) are inoculated with 2 ml of an overnight culture of the lactic acid bacterium strain, and left at inoculation temperature until pH 4.58, followed by storage at 4° C. until shear stress is measured, typically from 1-7 days, such as for 5 days, followed by gently stirring and measuring the shear stress at shear rate 300 s⁻¹, wherein the inoculation temperature is 30° C. The shear stress is measured using the method indicated in Example 2.

[0776] For example, the texturing lactic acid bacterium strain (ix), which is preferably Lactococcus lactis strain DSM 33142, or a mutant or a variant therefrom, generates fermented milks having a shear stress greater than 45 Pa, preferably greater than 50 Pa, more preferably greater than 55 Pa, such as about 56 Pa, at shear rate 300 s⁻¹, under the following conditions:

[0777] 200 ml semi-fat milk (1.5% fat) is heated to 90° C. for 20 min, followed by cooling to inoculation temperature, and inoculated with 2 ml of an overnight culture of the lactic acid bacterium strain, and left at inoculation temperature until pH 4.55, followed by storage at 4° C. until shear stress is measured, typically from 1-7 days, such as for 5 days, followed by gently stirring and measuring the shear stress at shear rate 300 s⁻¹, wherein the inoculation temperature is 30° C. The shear stress is measured using the method indicated in Example 1.

[0778] For example, the texturing lactic acid bacterium strain (ix), which is preferably Lactococcus lactis strain DSM 33142, or a mutant or a variant therefrom, generates fermented milks having a shear stress greater than 24 Pa, preferably greater than 30 Pa, more preferably greater than 40 Pa, such as about 42 Pa, at shear rate 300 s⁻¹, under the following conditions:

[0779] 200 ml of soy milk supplemented with 2% glucose (as described in Example 2) are inoculated with 2 ml of an overnight culture of the lactic acid bacterium strain, and left at inoculation temperature until pH 4.55, followed by storage at 4° C. until shear stress is measured, typically from 1-7 days, such as for 5 days, followed by gently stirring and measuring the shear stress at shear rate 300 s⁻¹, wherein the inoculation temperature is 30° C. The shear stress is measured using the method indicated in Example 2.

[0780] For example, the texturing lactic acid bacterium strain (x), which is preferably Lactococcus lactis strain DSM 33183, or a mutant or a variant therefrom, generates fermented milks having a shear stress greater than 60 Pa, preferably greater than 65 Pa, more preferably greater than 70 Pa, such as about 72 Pa, at shear rate 300 s⁻¹, under the following conditions:

[0781] 200 ml semi-fat milk (1.5% fat) is heated to 90° C. for 20 min, followed by cooling to inoculation temperature, and inoculated with 2 ml of an overnight culture of the lactic acid bacterium strain, and left at inoculation temperature until pH 4.55, followed by storage at 4° C. until shear stress is measured, typically from 1-7 days, such as for 5 days, followed by gently stirring and measuring the shear stress at shear rate 300 s⁻¹, wherein the inoculation temperature is 30° C. The shear stress is measured using the method indicated in Example 1.

[0782] For example, the texturing lactic acid bacterium strain (x), which is preferably Lactococcus lactis strain DSM 33183, or a mutant or a variant therefrom, generates fermented milks having a shear stress greater than 24 Pa, preferably greater than 30 Pa, more preferably greater than 50 Pa, such as about 59 Pa, at shear rate 300 s⁻¹, under the following conditions:

[0783] 200 ml of soy milk supplemented with 2% glucose (as described in Example 2) are inoculated with 2 ml of an overnight culture of the lactic acid bacterium strain, and left at inoculation temperature until pH 4.86, followed by storage at 4° C. until shear stress is measured, typically from 1-7 days, such as for 5 days, followed by gently stirring and measuring the shear stress at shear rate 300 s⁻¹, wherein the inoculation temperature is 30° C. The shear stress is measured using the method indicated in Example 2.

[0784] The present invention also provides a Lactococcus lactis strain selected from the following strains:
[0785] (i)—Lactococcus lactis strain DSM 33134 and strains derived from DSM 33134, wherein the derived strain is characterized as having at least the same texturing capability as DSM 33134;
[0786] (ii)—Lactococcus lactis strain DSM 33135 and strains derived from DSM 33135, wherein the derived strain is characterized as having at least the same texturing capability as DSM 33135;
[0787] (iii)—Lactococcus lactis strain DSM 33136 and strains derived from DSM 33136, wherein the derived strain is characterized as having at least the same texturing capability as DSM 33136;
[0788] (iv)—Lactococcus lactis strain DSM 33137 and strains derived from DSM 33137, wherein the derived strain is characterized as having at least the same texturing capability as DSM 33137;
[0789] (v)—Lactococcus lactis strain DSM 33138 and strains derived from DSM 33138, wherein the derived strain is characterized as having at least the same texturing capability as DSM 33138;
[0790] (vi)—Lactococcus lactis strain DSM 33139 and strains derived from DSM 33139, wherein the derived strain is characterized as having at least the same texturing capability as DSM 33139;
[0791] (vii)—Lactococcus lactis strain DSM 33140 and strains derived from DSM 33140, wherein the derived strain is characterized as having at least the same texturing capability as DSM 33140;
[0792] (viii)—Lactococcus lactis DSM 33141 and strains derived from DSM 33141, wherein the derived strain is characterized as having at least the same texturing capability as DSM 33141;
[0793] (ix)—Lactococcus lactis strain DSM 33142 and strains derived from DSM 33142, wherein the derived strain is characterized as having at least the same texturing capability as DSM 33142;
[0794] (x)—Lactococcus lactis strain DSM 33183 and strains derived from DSM 33183, wherein the derived strain is characterized as having at least the same texturing capability as DSM 33183.

[0795] In addition, the present invention provides the following Lactococcus lactic strain, DSM 33192 and strains derived from DSM 33192, wherein the derived strain is characterized as having at least the same texturing capability as DSM 33192. The eps gene cluster of DSM 33192 comprises the following genes in the variable and conserved parts:
[0796] Variable part: wzy (SEQ ID NO.: 194), wzx (SEQ ID NO.: 196), gene coding GT1 (SEQ ID NO.: 190), gene coding GT2 (SEQ ID NO.: 191), gene coding GT3 (SEQ ID NO.: 192), gene coding GT4 (SEQ ID NO.: 193) and gene coding a glycerophosphotransferase family protein (SEQ ID NO.: 195).
[0797] Conserved part: epsR (SEQ ID NO.: 184), epsX (SEQ ID NO.: 185), epsB (SEQ ID NO.: 188), epsD (SEQ ID NO.: 187), epsL (SEQ ID NO.: 197), gene coding LytR protein (SEQ ID NO.: 198), epsC (SEQ ID NO.: 186) and epsE (SEQ ID NO.: 189).

[0798] Strain DSM 33192, or a mutant or a variant therefrom, generates fermented milks having a shear stress greater than 70 Pa, preferably greater than 80 Pa, more preferably greater than 85 Pa, even more preferably greater than 90 Pa, such as about 94 Pa, measured at shear rate 300 s⁻¹, under the following conditions:

[0799] 200 ml semi-fat milk (1.5% fat) is heated to 90° C. for 20 min, followed by cooling to inoculation temperature, and inoculated with 2 ml of an overnight culture of the lactic acid bacterium strain, and left at inoculation temperature until pH 5.6, followed by storage at 4° C. until shear stress is measured, typically from 1-7 days, such as for 5 days, followed by gently stirring and measuring the shear stress at shear rate 300 s⁻¹, wherein the inoculation temperature is 30° C. The shear stress is measured using the method indicated in Example 1.

[0800] Strain DSM 33192, or a mutant or a variant therefrom, generates fermented milks having a shear stress greater than 24 Pa, preferably greater than 30 Pa, more preferably greater than 40 Pa, even more preferably greater than 45 Pa, such as about 47 Pa, measured at shear rate 300 s⁻¹, under the following conditions:

[0801] 200 ml of soy milk supplemented with 2% glucose (as described in Example 2) are inoculated with 2 ml of an overnight culture of the lactic acid bacterium strain, and left at inoculation temperature until pH 4.55, followed by storage at 4° C. until shear stress is measured, typically from 1-7 days, such as for 5 days, followed by gently stirring and measuring the shear stress at shear rate 300 s⁻¹, wherein the inoculation temperature is 30° C. The shear stress is measured using the method indicated in Example 2.

[0802] The Composition Comprising a LAB of the Invention

[0803] In a second aspect, the present invention provides a composition comprising one or more of the texturing Lactococcus lactis strains of the invention as described in the first aspect of the present invention.

[0804] Accordingly, the composition of the invention comprises at least one of the LAB (i) to (x) as described above in the context of the first aspect of the present invention.

[0805] In particular, the present invention provides a composition comprising one or more of the texturing Lactococcus lactis strains of the invention as described in the first aspect of the present invention and a co-acidifier or helper strain as defined in the first aspect of the present invention. In a preferred embodiment, the composition of the present invention comprises one or more of the texturing Lactococcus lactis strains of the invention as described in the first aspect of the present invention and a co-acidifier or helper strain as defined in the first aspect of the present invention in a ratio of about 9:1 (LAB strain(s) of the present invention: co-acidifier or helper strain(s)).

[0806] Preferably, the composition of the present invention comprises at least one Lactococcus lactis lactic acid bacterium strain according to the first aspect of the present invention and one or more further lactic acid bacterium strain(s), wherein the one or more further lactic acid bacterium strain(s) is(are) able to:

[0807] i) generate fermented milks with a pH of about 4.55 in about 15 h or less, preferably in about 12 h or less, measured under the following conditions:

[0808] 200 ml semi-fat milk (1.5% fat) is heated to 90° C. for 20 min, followed by cooling to inoculation temperature (30° C.), and inoculated with 2 ml of an overnight culture of the lactic acid bacterium strain, and left at inoculation temperature until a pH of about 4.55 is reached. Therefore, the “time-to-pH 455” can be calculated for a certain lactic acid bacterium strain; and

[0809] ii) generate fermented milks having a shear stress of 40 Pa or more measured at shear rate 300 s⁻¹, measured under following conditions:

[0810] 200 ml semi-fat milk (1.5% fat) is heated to 90° C. for 20 min, followed by cooling to inoculation temperature, and inoculated with 2 ml of an overnight culture of the lactic acid bacterium strain, and left at inoculation temperature until pH 4.55, time to pH 4.55) followed by storage at 4° C. until shear stress is measured, typically from 1-7 days, such as for 5 days, followed by gently stirring and measuring the shear stress at shear rate 300 s⁻¹, wherein the inoculation temperature is 30° C.

[0811] More preferably, the composition of the present invention comprises at least one Lactococcus lactis lactic acid bacterium strain (i) to (x) according to the first aspect of the present invention in combination with (a) at least one lactic acid bacterium strain Lactococcus lactis comprising an active eps gene cluster capable of producing exopolysaccharide (EPS), wherein the eps gene cluster comprises the nucleotide sequences (a), (b) and (c) (a to c4) as defined in (xi), or (b) a lactic acid bacterium strain Lactococcus lactis comprising an active eps gene cluster capable of producing exopolysaccharide (EPS), wherein the eps gene cluster is as defined in (xii):
[0812] (xi) (a): a nucleotide sequence encoding a polypeptide having polymerase activity and having at least 70%, preferably at least 85%, more preferably at least 95%, even more preferably at least 98%, and most preferably 100% identity with the amino acid sequence encoded by nucleotides 6955-8145 of SEQ ID NO:183 (herein termed wzy);
   [0813] (b): a nucleotide sequence encoding a polypeptide having polysaccharide transporter activity and having at least 70%, preferably at least 85%, more preferably at least 95%, even more preferably at least 98%, and most preferably 100% identity with the amino acid sequence encoded by nucleotides 9309-10727 of SEQ ID NO:183 (herein termed wzx); and
   [0814] (c): a nucleotide sequence encoding a polypeptide having glycosyltransferase (GT) activity comprising:
   [0815] (c1): a nucleotide sequence having at least 70%, preferably at least 85%, more preferably at least 95%, even more preferably at least 98%, and most preferably 100% identity with the amino acid sequence encoded by nucleotides 4008-4478 of SEQ ID NO:183 (herein termed GT1);
   [0816] (c2): a nucleotide sequence having at least 70%, preferably at least 85%, more preferably at least 95%, even more preferably at least 98%, and most preferably 100% identity with the amino acid sequence encoded by nucleotides 4478-4960 of SEQ ID NO:183 (herein termed GT2);
   [0817] (c3): a nucleotide sequence having at least 70%, preferably at least 85%, more preferably at least 95%, even more preferably at least 98%, and most preferably 100% identity with the amino acid sequence encoded by nucleotides 5015-5965 of SEQ ID NO:183 (herein termed GT3); and
   [0818] (c4): a nucleotide sequence having at least 70%, preferably at least 85%, more preferably at least 95%, even more preferably at least 98%, and most preferably 100% identity with the amino acid sequence encoded by nucleotides 6026-6955 of SEQ ID NO:183 (herein termed GT4);
[0819] (xii) SEQ ID NO.: 290.

[0820] In a further preferred embodiment, the composition of the present invention comprises at least one Lactococcus lactis lactic acid bacterium strain according to the first aspect of the present invention and one or more lactic acid bacterium strains comprising an active eps gene cluster capable of producing exopolysaccharide (EPS), wherein the eps gene cluster is as defined in SEQ ID NO.: 291-294 wherein the further strain is able to (i) generate fermented milks with a pH of about 4.55 in about 15 h or less, preferably in about 12 h or less, measured as defined above, and is able to (ii) generate fermented milks having a shear stress of 40 Pa or more measured at shear rate 300 s⁻¹, measured as described above.

[0821] In a further preferred embodiment, the composition of the present invention comprises at least one Lactococcus lactis lactic acid bacterium strain (i) to (x), according to the first aspect of the present invention, and one or more lactic acid bacterium strains selected from strains DSM 33193, DSM 33133, DSM 33196, DSM 33197, DSM 33200, DSM 33201, DSM 33203, DSM 33204, DSM 33205, DSM 33218, DSM 33219, DSM 33220, DSM 33221, DSM 33222, DSM 33224, DSM 33225, DSM 33140, DSM 33142, DSM 33137, DSM 33192 and/or DSM 25485, preferably selected from strains DSM 33193, DSM 33196, DSM 33197, DSM 33200, DSM 33201, DSM 33205, DSM 33218, DSM 33220, DSM 33221, DSM 33222, DSM 33224, DSM 33225, DSM 33137, DSM 33192 and/or DSM 25485.

[0822] More preferably, the composition of the invention comprises at least one, preferably one, of the LAB (i) to (x) as described above in the context of the first aspect of the present invention and
[0823] (i) the LAB strain Lactococcus lactis subsp. cremoris DSM 25485, or a mutant or variant therefrom; and/or
[0824] (ii) the lactic acid bacterium strain Lactococcus lactis subsp. lactis DSM 33192, or a mutant or variant therefrom; and/or
[0825] (iii) the lactic acid bacterium strain Lactococcus lactis DSM 33133, or a mutant or variant therefrom.

[0826] For example, the composition of the present invention comprises strain DSM 33134 and strain DSM 25485. For example, the composition of the present invention comprises strain DSM 33135 and strain DSM 25485. For example, the composition of the present invention comprises strain DSM 33136 and strain DSM 25485. For example, the composition of the present invention comprises strain DSM 33137 and strain DSM 25485. For example, the composition of the present invention comprises strain DSM 33138 and strain DSM 25485. For example, the composition of the present invention comprises strain DSM 33139 and strain DSM 25485. For example, the composition of the present invention comprises strain DSM 33140 and strain DSM 25485. For example, the composition of the present invention comprises strain DSM 33141 and strain DSM 25485.

[0827] For example, the composition of the present invention may comprise one or more of strains DSM 33134, DSM 33135, DSM 33136, DSM 33137, DSM 33138, DSM 33139, DSM 33140, DSM 33142 and/or DSM 33141 and one or more of the co-acidifier or helper strains as defined in the first aspect of the present invention, preferably one or more of the following strains: DSM 25485, DSM 33192 and/or DSM 33133.

[0828] In a further embodiment, the composition of the present invention may comprise strain DSM 33134 and strain DSM 24649. In a further embodiment, the composition of the present invention may comprise strain DSM 33139 and strain DSM 24649.

[0829] Preferably, the composition of the present invention in any of its embodiments comprises at least 1×10⁶ CFU (colony-forming units)/ml total LAB strains. It may be preferred that the composition comprises at least 1×10⁸ CFU/ml of the at least one, preferably one, lactic acid bacterium strain according to the invention.

[0830] In a further embodiment, the composition of the invention may also comprise at least one Lactococcus lactis lactic acid bacterium strain according to the first aspect of the present invention and yeast extract, preferably yeast extract in an amount of 0.2%. Yeast extract can be obtained from any source available to the skilled person, such as from Procelys (e.g., Yeast Extract NuCel® 545 MG, batch number 0005115910, batch AD 18 A05030). For example, the composition of the present invention may comprise one or more of strains DSM 33134, DSM 33137, DSM 33139 and/or DSM 33140 and yeast extract, preferably in an amount of 0.2%, as described above. As it can be seen in Table 1, the presence of yeast may decrease the time-to-pH 4.55, measured as described above, and may lead to fermented milks with higher shear stress.

[0831] As described above in the context of the first aspect of the present invention, the LAB of the present invention, either alone or in combination with co-acidifier or helper strain, preferably LAB strain Lactococcus lactis strain DSM 25485, are able to generate fermented milks having high shear stress. Accordingly, the composition of the present invention is able to generate at least the same shear stress as the one described for the LAB of the present invention, either alone or in the presence of a co-acidifier or helper strain, as described in the context of the first aspect of the present invention.

[0832] Lactic acid bacteria, including bacteria of the species Lactococcus sp., are normally supplied to the dairy industry either as frozen (F-DVS) or freeze-dried (FD-DVS) cultures for bulk starter propagation or as so-called “Direct Vat Set” (DVS) cultures, intended for direct inoculation into a fermentation vessel or vat for the production of a dairy product, such as a fermented milk product. Such lactic acid bacterial cultures are in general referred to as “starter cultures” or “starters”. Accordingly, the composition of the present invention may be frozen or freeze-dried. In addition, the composition of the present invention may be provided in liquid form. Thus, in one embodiment, the composition is in frozen, dried, freeze-dried or liquid form.

[0833] The composition of the present invention may additionally comprise cryoprotectants, lyoprotectants, antioxidants, nutrients, fillers, flavorants or mixtures thereof. The composition preferably comprises one or more of cryoprotectants, lyoprotectants, antioxidants and/or nutrients, more preferably cryoprotectants, lyoprotectants and/or antioxidants and most preferably cryoprotectants or lyoprotectants, or both. Use of protectants such as croprotectants and lyoprotectants are known to a skilled person in the art. Suitable cryoprotectants or lyoprotectants include mono-, di-, tri- and polysaccharides (such as glucose, mannose, xylose, lactose, sucrose, trehalose, raffinose, maltodextrin, starch and gum arabic (acacia) and the like), polyols (such as erythritol, glycerol, inositol, mannitol, sorbitol, threitol, xylitol and the like), amino acids (such as proline, glutamic acid), complex substances (such as skim milk, peptones, gelatin, yeast extract) and inorganic compounds (such as sodium tripolyphosphate).

[0834] In one embodiment, the composition according to the present invention may comprise one or more cryoprotective agent(s) selected from the group consisting of inosine-5′-monophosphate (IMP), adenosine-5′-monophosphate (AMP), guanosine-5′-monophosphate (GMP), uranosine-5′-monophosphate (UMP), cytidine-5′-monophosphate (CMP), adenine, guanine, uracil, cytosine, adenosine, guanosine, uridine, cytidine, hypoxanthine, xanthine, hypoxanthine, orotidine, thymidine, inosine and a derivative of any such compounds. Suitable antioxidants include ascorbic acid, citric acid and salts thereof, gallates, cysteine, sorbitol, mannitol, maltose. Suitable nutrients include sugars, amino acids, fatty acids, minerals, trace elements, vitamins (such as vitamin B-family, vitamin C). The composition may optionally comprise further substances including fillers (such as lactose, maltodextrin) and/or flavorants.

[0835] In one embodiment of the invention the cryoprotective agent is an agent or mixture of agents, which in addition to its cryoprotectivity has a booster effect.

[0836] The expression “booster effect” is used to describe the situation wherein the cryoprotective agent confers an increased metabolic activity (booster effect) on to the thawed or reconstituted culture when it is inoculated into the medium to be fermented or converted. Viability and metabolic activity are not synonymous concepts. Commercial frozen or freeze-dried cultures may retain their viability, although they may have lost a significant portion of their metabolic activity, e.g., cultures may lose their acid-producing (acidification) activity when kept stored even for shorter periods of time. Thus, viability and booster effect have to be evaluated by different assays. Whereas viability is assessed by viability assays such as the determination of colony forming units, booster effect is assessed by quantifying the relevant metabolic activity of the thawed or reconstituted culture relative to the viability of the culture. The term “metabolic activity” refers to the oxygen removal activity of the cultures, its acid-producing activity, i. e. the production of, e. g., lactic acid, acetic acid, formic acid and/or propionic acid, or its metabolite producing activity such as the production of aroma compounds such as acetaldehyde, (a-acetolactate, acetoin, diacetyl and 2,3-butylene glycol (butanediol)).

[0837] In one embodiment the composition of the invention contains or comprises from 0.2% to 20% of the cryoprotective agent or mixture of agents measured as % w/w of the material. It is, however, preferable to add the cryoprotective agent or mixture of agents at an amount which is in the range from 0.2% to 15%, from 0.2% to 10%, from 0.5% to 7%, and from 1% to 6% by weight, including within the range from 2% to 5% of the cryoprotective agent or mixture of agents measured as % w/w of the frozen material by weight. In a preferred embodiment the culture comprises approximately 3% of the cryoprotective agent or mixture of agents measured as % w/w of the material by weight. The amount of approximately 3% of the cryoprotective agent corresponds to concentrations in the 100 mM range. It should be recognized that for each aspect of embodiment of the invention the ranges may be increments of the described ranges.

[0838] In one embodiment the composition of the invention may comprise thickener and/or stabilizer, such as pectin (e.g. HM pectin, LM pectin), gelatin, CMC, Soya Bean Fiber/Soya Bean Polymer, starch, modified starch, carrageenan, alginate, and guar gum.

[0839] In one embodiment wherein the microorganism produces a polysaccharide (such as EPS) which causes a high/ropy texture in the acidified milk product the acidified milk product is produced substantially free, or completely free of any addition of thickener and/or stabilizer, such as pectin (e.g. HM pectin, LM pectin), gelatin, CMC, Soya Bean Fiber/Soya Bean Polymer, starch, modified starch, carrageenan, alginate, and guar gum. By substantially free should be understood that the product comprises from 0% to 20% (w/w) (e.g. from 0% to 10%, from 0% to 5% or from 0% to 2% or from 0% to 1%) thickener and/or stabilizer.

[0840] Use of the LAB Strains for Increasing the Viscosity of a Fermented Milk Product

[0841] In a third aspect, the present invention provides the use of the LAB or the present invention, as described in the first aspect, and/or the use of the composition of the present invention, as described in the second aspect, for increasing the viscosity of a fermented milk product. Hence, in the third aspect, the present invention provides a method for increasing the viscosity (i.e., for improving the texture) of a fermented milk product, wherein the method comprises the use of the LAB or the present invention, as described in the first aspect, and/or the use of the composition of the present invention, as described in the second aspect.

[0842] As described above, the LAB strains (i) to (x) of the present invention, as described in the first aspect, and the compositions of the present invention, as described in the second aspect, are able to generate fermented milks having a shear stress greater than 40 Pa, such as about 41 Pa, 42 Pa, 43 Pa, 44 Pa, 45 Pa, 46 Pa or more, preferably the LAB strains/compositions of the present invention generate fermented milk having a shear stress of 54 Pa or more, such as about 48 Pa, 52 Pa, 53 Pa, 60 Pa, 64 Pa, 65 Pa, 66 Pa, 67 Pa, 70 Pa or 72 Pa, preferably in the presence of co-acidifier or helper strain, which is preferably selected from DSM 25485, DSM 33192, and/or DSM 33133, even more preferably strain DSM 25485, measured at shear rate 300 s⁻¹, under the following conditions:

[0843] 200 ml semi-fat milk (1.5% fat) is heated to 90° C. for 20 min, followed by cooling to inoculation temperature, and inoculated with 2 ml of an overnight culture of the lactic acid bacterium strain, and left at inoculation temperature until pH 4.55, followed by storage at 4° C. until shear stress is measured, typically from 1-7 days, such as for 5 days, followed by gently stirring and measuring the shear stress at shear rate 300 s⁻¹, wherein the inoculation temperature is 30° C. The shear stress is measured using the method indicated in Example 1.

[0844] As described above, the LAB strains (i) to (x) of the present invention, as described in the first aspect, and the compositions of the present invention, as described in the second aspect, are able to generate fermented milks having a shear stress greater than 24 Pa, such as about 27 Pa, 28 Pa, 29 Pa, 30 Pa, 32 Pa, 35 Pa, 37 Pa, 42 Pa, 47 Pa, 54 Pa, 59 Pa or more, measured at shear rate 300 s⁻¹, under the following conditions:

[0845] 200 ml of soy milk supplemented with 2% glucose (as described in Example 2) are inoculated with 2 ml of an overnight culture of the lactic acid bacterium strain, and left at inoculation temperature until pH^{˜}4.55 (such as pH 4.55, 4.48, 4.71, 4.64, 4.68, 4.58, 4.4, 4.56, 4.58 or 4.86), followed by storage at 4° C. until shear stress is measured, typically from 1-7 days, such as for 5 days, followed by gently stirring and measuring the shear stress at shear rate 300 s⁻¹, wherein the inoculation temperature is 30° C. The shear stress is measured using the method indicated in Example 2.

[0846] For the specific shear stress of milk fermented with the specific LAB strains of the invention, either alone or in the presence of an acidifying LAB strain, we refer to the first aspect of the present invention.

[0847] As discussed in the context of the first aspect of the present invention, some of the LAB strains of the present invention are able to acidify mammalian milk in 15 h or less, measured as described in the first aspect of the present invention (“fast-acidifying” strains). These strains may thus be preferably used on their own or in combination with other strains for the generation of fermented milks, in particular for their use of fermented milk with increased viscosity.

[0848] In addition, there are some LAB strains of the present invention that are not able to acidify mammalian milk in 15 h or less, measured as described in the first aspect of the present invention. They may be referred to as “slow-acidifying” strains (e.g., DSM 33134, 33135, DSM 33136, 33138, 33139, 33141 and/or 33183). These strains may advantageously be used in the presence of a co-acidifier or helper strain as defined in the first aspect of the present invention. In particular, these strains may be advantageously used in the presence of strain DSM 25485, and/or strain DSM 33192, and/or strain DSM 33133. As described above, preferably, the one or more of the texturing Lactococcus lactic strains of the invention as described in the first aspect of the present invention and a co-acidifier or helper strain as defined in the first aspect of the present invention are used in combination in a ratio of about 9:1 (LAB strain(s) of the present invention: co-acidifier or helper strain(s)).

[0849] As shown in Table 1, when milk is fermented with one of the LAB strains of the present invention and the co-acidifier strain DSM 25485, the shear stress values of milk are increased and/or the “time-to-pH 4.55” is decreased. Without being limited to theory, it is believed that, as described above, the proteolytic nature of DSM 25485 allows and/or facilitates the growth of the LAB of the present invention. In addition, it is believed that a combination of the EPS produced by DSM 25485 and the EPS produced by the strain of the present invention results in the enhanced viscosity of the fermented milk observed, measured as shear stress, as described above.

[0850] Without being limited to theory, it is believed that effect in increased in shear stress of milk fermented with one of the LAB of the present invention and the co-acidifier strain DSM 25485 (see Table 1) would also be obtained when milk is incubated with one of the LAB of the present invention (i) to (x), as described above, and strain DSM 33192. Strain DSM 33192 is also a proteolytic strain and produces EPS with similar structure as the structure of the EPS produced by strain DSM 25485.

[0851] In addition, without being limited to theory, it is it is believed that effect in increase in shear stress of milk fermented with one of the LAB of the present invention and the co-acidifier strain DSM 25485 (see Table 1) would also be obtained when milk is incubated with one of the LAB of the present invention (i) to (x), as described above, and one or more of the following strains: DSM 33193, DSM 33133, DSM 33196, DSM 33197, DSM 33200, DSM 33201, DSM 33203, DSM 33204, DSM 33205, DSM 33218, DSM 33219, DSM 33220, DSM 33221, DSM 33222, DSM 33224, DSM 33225, DSM 33140, DSM 33142, DSM 33137, DSM 33192 and/or DSM 25485, preferably one or more of the following strains DSM 33193, DSM 33196, DSM 33197, DSM 33200, DSM 33201, DSM 33205, DSM 33218, DSM 33220, DSM 33221, DSM 33222, DSM 33224, DSM 33225, DSM 33137, DSM 33192 and/or DSM 25485. These strains are able to:

[0852] i) generate fermented milks with a pH of about 4.55 in about 15 h or less, preferably in about 12 h or less, measured under the following conditions:

[0853] 200 ml semi-fat milk (1.5% fat) is heated to 90° C. for 20 min, followed by cooling to inoculation temperature (30° C.), and inoculated with 2 ml of an overnight culture of the lactic acid bacterium strain, and left at inoculation temperature until a pH of about 4.55 is reached. Therefore, the “time-to-pH 455” can be calculated for a certain lactic acid bacterium strain; and

[0854] ii) generate fermented milks having a shear stress of 40 Pa or more measured at shear rate 300 s⁻¹, measured under following conditions:

[0855] 200 ml semi-fat milk (1.5% fat) is heated to 90° C. for 20 min, followed by cooling to inoculation temperature, and inoculated with 2 ml of an overnight culture of the lactic acid bacterium strain, and left at inoculation temperature until pH 4.55, time to pH 4.55) followed by storage at 4° C. until shear stress is measured, typically from 1-7 days, such as for 5 days, followed by gently stirring and measuring the shear stress at shear rate 300 s⁻¹, wherein the inoculation temperature is 30° C.

[0856] In a specific embodiment of the third aspect, the present invention provides the use of the Lactococcus lactic subsp. cremoris strain DSM 25485, for increasing viscosity of a fermented milk product.

[0857] The present inventors have found that strain DSM 25485 generated fermented milks having a shear stress greater than 45 Pa, preferably greater than 50 Pa, more preferably greater than 55 Pa, such as 56 Pa, see Table 1, measured at shear rate 300 s⁻¹, measured under following conditions:

[0858] 200 ml semi-fat milk (1.5% fat) is heated to 90° C. for 20 min, followed by cooling to inoculation temperature, and inoculated with 2 ml of an overnight culture of the lactic acid bacterium strain, and left at inoculation temperature until pH 4.55 followed by storage at 4° C. until shear stress is measured, typically from 1-7 days, such as for 5 days, followed by gently stirring and measuring the shear stress at shear rate 300 s⁻¹, wherein the inoculation temperature is 30° C. The shear stress is measured using the method indicated in Example 1.

[0859] In addition, the present inventors have surprisingly found that strain DSM 25485 generated fermented milks having a shear stress greater than 24 Pa, preferably greater than 30 Pa, more preferably greater than 50 Pa, such as 54 Pa, see Table 2, measured at shear rate 300 s⁻¹, measured under following conditions:

[0860] 200 ml of soy milk supplemented with 2% glucose (as described in Example 2) are inoculated with 2 ml of an overnight culture of the lactic acid bacterium strain, and left at inoculation temperature until pH 4.55, followed by storage at 4° C. until shear stress is measured, typically from 1-7 days, such as for 5 days, followed by gently stirring and measuring the shear stress at shear rate 300 s⁻¹, wherein the inoculation temperature is 30° C. The shear stress is measured using the method indicated in Example 2.

[0861] In this embodiment, advantageously, strain DSM 25485 can be used alone and/or in combination with one or more of the LAB (i) to (x) of the present invention, described in the first aspect of the present invention. Preferably, strain DSM 25485 is used in combination with one or more of the LAB of the present invention, described in the first aspect of the present invention in a ratio of about 9:1 (LAB strain(s) of the present invention: strain DSM 25485).

[0862] In a further specific embodiment of the third aspect, the present invention provides the use of the Lactococcus lactis subsp. lactis DSM 33192, for increasing viscosity of a fermented milk product. The present inventors have surprisingly 3 found that strain DSM 33192 generated fermented milks having a shear stress greater than 40 Pa, preferably greater than 50 Pa, more preferably greater than 80 Pa, even more preferably greater than 90 Pa, such as 94 Pa, see Table 1, measured at shear rate 300 s⁻¹, measured under following conditions:

[0863] 200 ml semi-fat milk (1.5% fat) is heated to 90° C. for 20 min, followed by cooling to inoculation temperature, and inoculated with 2 ml of an overnight culture of the lactic acid bacterium strain, and left at inoculation temperature until pH 4.55 followed by storage at 4° C. until shear stress is measured, typically from 1-7 days, such as for 5 days, followed by gently stirring and measuring the shear stress at shear rate 300 s⁻¹, wherein the inoculation temperature is 30° C. The shear stress is measured using the method indicated in Example 1.

[0864] In addition, the present inventors have surprisingly found that strain DSM 33192 generated fermented milks having a shear stress greater than 24 Pa, preferably greater than 30 Pa, more preferably greater than 40 Pa, even more preferably greater than 45 Pa, such as 47 Pa, see Table 2, measured at shear rate 300 s⁻¹, measured under following conditions:

[0865] 200 ml of soy milk supplemented with 2% glucose (as described in Example 2) are inoculated with 2 ml of an overnight culture of the lactic acid bacterium strain, and left at inoculation temperature until pH 4.55, followed by storage at 4° C. until shear stress is measured, typically from 1-7 days, such as for 5 days, followed by gently stirring and measuring the shear stress at shear rate 300 s⁻¹, wherein the inoculation temperature is 30° C. The shear stress is measured using the method indicated in Example 2.

[0866] In this embodiment, advantageously, strain DSM 33192 can be used alone and/or in combination with one or more of the LAB (i) to (x) of the present invention, described in the first aspect of the present invention. Preferably, strain DSM 33192 is used in combination with one or more of the LAB of the present invention, described in the first aspect of the present invention in a ratio of about 9:1 (LAB strain(s) of the present invention: strain DSM 33192).

[0867] In a specific embodiment of the third aspect, the present invention provides the use of the Lactococcus lactis subsp. cremoris strain DSM 25485 and/or the use of Lactococcus lactis subsp. lactis strain DSM 33192, as co-acidifier or helper strains, preferably their use in combination with other texturing LAB strains, such as strains (i) to (x) as defined in the first aspect of the present invention, for increasing viscosity of a fermented milk product.

[0868] Method of Producing a Food Product and Food Product

[0869] In a fourth aspect, the present invention relates to a method of producing a food product comprising at least one stage in which at least one lactic acid bacterium strain (i) to (x) as defined in the first aspect of the present invention and/or the composition as defined in the second aspect of the present invention is used. The production of the food product is carried out by methods known to the person skilled in the art.

[0870] In another embodiment, the present invention relates to a method of producing a food product comprising at least one stage in which the lactic acid bacterium strain Lactococcus lactis subsp. cremoris DSM 25485, or a mutant or variant therefrom is used.

[0871] In another embodiment, the present invention relates to a method of producing a food product comprising at least one stage in which the lactic acid bacterium strain Lactococcus lactis subsp. lactis DSM 33192, or a mutant or variant therefrom is used.

[0872] “Fermentation” in the context of the present invention in any of its embodiments means the conversion of carbohydrates into alcohols or acids through the action of microorganisms (LAB). Fermentation processes to be used in production of food products such as dairy products are well known and the person of skill in the art will know how to select suitable process conditions, such as temperature, oxygen, amount of microorganism(s) and process time. Obviously, fermentation conditions are selected so as to support the achievement of the present invention, e.g., to obtain a food product, preferably a food product which has an improved texture as compared to a food product produced with a method which does not involve the use of at least one of the LAB as described in the first aspect of the present invention or the use of the composition as described in the second aspect of the present invention, in any of its embodiments.

[0873] In one preferred embodiment, the method of the present invention in any of its embodiments comprises fermenting a milk substrate, which can be a mammalian-based milk substrate or a plant-based milk substrate, such as soy milk, preferably supplemented with glucose, such as 0.5-5%, preferably 0.5-2%, more preferably 2%, with a composition comprising at least 1×10⁶ CFU, preferably at least 1×10⁸ CFU/ml of total LAB strains.

[0874] For instance, the method of the present invention comprises fermenting a milk substrate with a composition comprising at least 1×10⁶ CFU, preferably at least 1×10⁸ CFU/ml of strains DSM 33134 and DSM 25485.

[0875] For instance, the method of the present invention comprises fermenting a milk substrate with a composition comprising at least 1×10⁶ CFU, preferably at least 1×10⁸ CFU/ml of strains DSM 33135 and DSM 25485.

[0876] For instance, the method of the present invention comprises fermenting a milk substrate with a composition comprising at least 1×10⁶ CFU, preferably at least 1×10⁸ CFU/ml of strains DSM 33136 and DSM 25485.

[0877] For instance, the method of the present invention comprises fermenting a milk substrate with a composition comprising at least 1×10⁶ CFU, preferably at least 1×10⁸ CFU/ml of strains DSM 33138 and DSM 25485.

[0878] For instance, the method of the present invention comprises fermenting a milk substrate with a composition comprising at least 1×10⁶ CFU, preferably at least 1×10⁸ CFU/ml of strains DSM 33139 and DSM 25485.

[0879] For instance, the method of the present invention comprises fermenting a milk substrate with a composition comprising at least 1×10⁶ CFU, preferably at least 1×10⁸ CFU/ml of strain DSM 33137. For instance, the method of the present invention comprises fermenting a milk substrate with a composition comprising at least 1×10⁶ CFU, preferably at least 1×10⁸ CFU/ml of strains DSM 33137 and DSM 25485.

[0880] For instance, the method of the present invention comprises fermenting a milk substrate with a composition comprising at least 1×10⁶ CFU, preferably at least 1×10⁸ CFU/ml of strain DSM 33140. For instance, the method of the present invention comprises fermenting a milk substrate with a composition comprising at least 1×10⁶ CFU, preferably at least 1×10⁸ CFU/ml of strains DSM 33140 and DSM 25485.

[0881] For instance, the method of the present invention comprises fermenting a milk substrate with a composition comprising at least 1×10⁶ CFU, preferably at least 1×10⁸ CFU/ml of strain DSM 33142.

[0882] For instance, the method of the present invention comprises fermenting a milk substrate with a composition comprising at least 1×10⁶ CFU, preferably at least 1×10⁸ CFU/ml of strains DSM 33141 and DSM 25485.

[0883] For instance, the method of the present invention comprises fermenting a milk substrate with a composition comprising at least 1×10⁶ CFU, preferably at least 1×10⁸ CFU/ml of strain DSM 33183.

[0884] In another preferred embodiment, the method comprises fermenting a milk substrate with the composition as described in the second aspect of the present invention, in any of its embodiments.

[0885] Preferably, the food product is a dairy product and the method in any of its embodiments comprises fermenting a milk substrate (also referred to as “milk base” in the context of the present invention) with the at least one LAB strain and/or with the composition according to the invention (first and second aspects, respectively) and/or with a co-acidifier or helper strain, as defined above, preferably with strain DSM 25485 and/or with strain DSM 33192.

[0886] Preferably, the food product is a dairy product and the method in any of its embodiments comprises fermenting a plant-based milk substrate (also referred to as “plant-based milk base” in the context of the present invention), such as soy milk, preferably soy milk supplemented with sugar, with the at least one LAB strain and/or with the composition according to the invention (first and second aspects, respectively). Sugar may be such as e.g. fructose, sucrose, High Fructose Corn Syrup (HFCS), honey, glucose, invert sugar, maltose, galactose, lactose, or any combination thereof. The concentration of sugar may be between 0.5% to 5%, from 0.5 to 2%, 0.5%, 1%, 1.5%, or 2% such as e.g. 0.5-5% glucose, preferably 0.5-2% glucose, more preferably about 2% glucose.

[0887] The food product according to the present invention may advantageously further comprise a thickener and/or a stabilizer, such as pectin (e.g. HM pectin, LM pectin), gelatin, CMC, Soya Bean Fiber/Soya Bean Polymer, starch, modified starch, carrageenan, alginate, and guar gum.

[0888] In a specific embodiment the food product is a dairy product, a meat product, a vegetable product, a fruit product or a cereal product. In a preferred embodiment, the food product is a dairy product. In another preferred embodiment, the food product is a plant-based food product, such as fermented soy milk.

[0889] The term “dairy product” as used herein refers to a food product produced from milk. As described above, in the context of the present application, the term “milk” is broadly used in its common meaning to refer to liquids produced by the mammary glands of animals (e.g., cows, sheep, goats, buffaloes, camel, etc.) or by plants. In a preferred embodiment, the milk is cow's milk. In accordance with the present invention the milk may have been processed and the term “milk” includes whole milk, skim milk, fat-free milk, low fat milk, full fat milk, lactose-reduced milk, or concentrated milk. Fat-free milk is non-fat or skim milk product. Low-fat milk is typically defined as milk that contains from about 1% to about 2% fat. Full fat milk often contains 2% fat or more. The term “milk” is intended to encompass milks from different mammalians and plant sources. Mammalian sources of milk include, but are not limited to cow, sheep, goat, buffalo, camel, llama, mare and deer. Plant sources of milk include, but are not limited to, milk extracted from soy bean. In a specific embodiment, the milk is cow's milk. In another specific embodiment, the milk is a plant-based milk, preferably soy milk, which can be preferably supplemented with sugar such as e.g. fructose, sucrose, High Fructose Corn Syrup (HFCS), honey, glucose, invert sugar, maltose, galactose, lactose, or any combination thereof. The concentration of sugar may be between 0.5% to 5%, from 0.5 to 2%, 0.5%, 1%, 1.5%, or 2% such as e.g. 0.5-5% glucose, preferably 0.5-2% glucose, more preferably about 2% glucose.

[0890] Preferred dairy products according to the invention are fermented milk products and cheese. In a specific embodiment the dairy product is a mesophilic dairy product.

[0891] In a particular embodiment of the invention, the fermented milk product is selected from the group consisting of buttermilk, sour milk, cultured milk, Smetana, sour cream, thick cream, cultured cream, ymer, fermented whey, Kefir, Yakult and fresh cheese, such as Quark, tvarog, and cream cheese. In particular, the fermented milk product is selected from the group consisting of Quark, sour cream and Kefir. In a preferred embodiment of the invention, the fermented milk product contains a further food product selected from the group consisting of fruit beverage, cereal products, fermented cereal products, chemically acidified cereal products, soy milk products, fermented soy milk products and any mixture thereof. In another preferred embodiment, the fermented milk product is a plant-based fermented milk product, such as fermented soy milk (e.g. plantgurt, from “Alpro”).

[0892] The fermented milk product typically contains protein in a level of between 1.0% by weight to 12.0% by weight, preferably between 2.0% by weight to 10.0% by weight. In a particular embodiment, sour cream contains protein in a level of between 1.0% by weight to 5.0% by weight, preferably between 2.0% by weight to 4.0% by weight. In a particular embodiment, Quark contains protein in a level of between 4.0% by weight to 12.0% by weight, preferably between 5.0% by weight to 10.0% by weight.

[0893] Preferably, the food product has an improved texture (improved viscosity, measured as shear stress at 300 s⁻¹, as described in the present invention and, e.g., in Example 1) as compared to a food product produced with a comparable method which does not involve the use of at least one of the LAB as described in the first aspect of the present invention and/or the use of the composition as described in the second aspect of the present invention, in any of its embodiments and/or the use of strain DSM 25485 and/or DSM 33192.

[0894] The invention also relates to a food product, preferably a dairy product, comprising at least one LAB strain as described in the first aspect of the present invention.

[0895] Any combination of the above-described elements, aspects and embodiments in all possible variations thereof is encompassed by the invention unless otherwise indicated herein or otherwise clearly contradicted by context. Embodiments of the present invention are described below, by way of examples only.

### EXAMPLES

### Example 1. High-Throughput Screening for Texturing Strains and Measurement of Milk Gel Texture

[0896] L. lactis is used to produce numerous fermented dairy products including cheese and mesophilic fermented milk, such as buttermilk and sour cream. Polysaccharide-producing strains are of great interest for these applications, as polysaccharides released into the medium can result in improved texturing properties of buttermilk and sour cream, while capsular polysaccharides can result in improved water-holding capacity and thus improved yields of, e.g., cheese.

[0897] Milk (liquid) is typically converted into milk gel (soft solid) when fermented with lactic acid bacteria typically belonging to, e.g., Streptococcus thermophilus, Lactobacillus spp. and Lactococcus lactis spp. Rheometer or texture analyzer are typically used to assess rheological properties of fermented milk gels, such as shear stress. Shear stress measurements are related to perceived mouth thickness, when the texture of milk gels is assessed by a sensory panel. High mouth thickness is considered an important quality factor of fermented milk gels such as yoghurt, and consumer acceptance is often very closely linked to the texture properties such as mouth thickness, which is a function of shear stress.

[0898] A liquid handling unit, Hamilton Robotics MicroLab Star, equipped with pressure sensor inside the air displacement barrel of the individual pipettes was used to screen for texturing strains as described in Poulsen et al., 2019. The liquid handler has a pressure sensor located in the headspace of each pipetting channel. Pressure data from each sensor was collected by TADM (Total Aspiration Dispense Monitoring) software of the Hamilton Robotics MicroLab Star liquid handler (Hamilton Robotics) and used to assess the relative shear stress of milk gel samples.

[0899] L. lactic from high-throughput screening strain library were screened for texturing properties using the TADM tool of the Hamilton liquid handling robot, as stated above, in 2-ml scale. Pressure versus time data (TADM) were obtained from 2 ml samples made in a 96-well micro-titer plate, where B-milk was inoculated for 20 h at 30° C. in the presence of different strains (1% of inoculum) unless otherwise stated, and then stored at 4 QC for 1 day. Hamilton liquid handling unit was used to measure pressure during aspiration, and the area above the pressure curves obtained during aspiration was used to compare the texturing abilities of the strains.

[0900] Shear stress data were obtained by inoculating the same microbial cultures in semi-fat milk (1.5% fat); milk was heated at 90° C. for 20 min and cooled down to the inoculation temperature, prior to inoculation with 1% volume overnight microbial culture. The inoculation took place for 8-22 h at 30° C. in 200-ml scale until pH^{˜}4.55, followed by cooling to 4° C. and storage until shear stress is measured, typically from 1-7 days, such as for 5 days at 4° C. After the storage, the fermented milk was stirred gently by means of a stick fitted with a bored disc until homogeneity of the sample. Shear stress of the samples was assessed on a rheometer (Anton Paar Physica Rheometer with ASC, Automatic Sample Changer, Anton Paar® GmbH, Austria) using the following settings:
[0901] Wait time (to rebuild to somewhat original structure)
[0902] 5 minutes without oscillation or rotation
[0903] Rotation (to measure shear stress at 300 s⁻¹ etc.)
[0904] Y′=[0.2707-300] s⁻¹ and y′=[275-0.2707] s⁻¹

[0905] 21 measuring points over 210 s (on every 10 s) going up to 300 s⁻¹ and 21 measuring points over 210 s (one every 10 s) going down to 0.2707 s⁻¹. For the data analysis, the shear stress at shear rate 300 s⁻¹ was chosen.

[0906] The good texturing ability of 11 strains DSM 33134, 33135, DSM 33136, 33137, 33138, 33139, 33140, 33141, 33142, 33183 and 33192 was confirmed using the rheometer as described above. Further, the good texturing ability of strain DSM 25485 was also confirmed using the rheometer as described above. The results are shown in Table 1.

TABLE 1
Shear stress and time-to-pH 4.55 for selected texturing strains (1% of inoculum) ±
yeast extract (0.2%, see below for the details) ± potential co-acidifier
(DSM 24649 or DSM 25485) incubated in heat-treated semi-fat milk at 30° C.,
as described above. Some of the strains under investigation are slow
acidifiers and require either presence of yeast
extract or a co-acidifier strain to acidify milk in an acceptable time, e.g.,
15 h or less to reach a
pH of 4.55. Strains DSM 29291, DSM 24649 and DSM 25485 were used alone or
in combination with strains under investigation and/or as potential
co-acidifiers (10 % inoculum—which corresponds to a ratio 9:1 (selected texturing
strain: co-acidifier strain). Generally, 1% inoculum of the strains
in milk (i.e. 2 ml overnight inoculum in
M17 medium added to 200 ml milk) was used. When a single strain is used as
inoculum, 2 ml (100 %) of this strain are added to 200 ml milk (1 % inoculum
in milk). When a strain is used together with a co-acidifier, 90% of
the strain under investigation (1.8 ml) and 10% (0.2 ml) of a co-acidifier are used
(10% of inoculum for the co-acidifier, ratio 9:1 (selected
texturing strain : co-acidifier strain).

| DSMZ | | | | | | | | | | |
|---|---|---|---|---|---|---|---|---|---|---|
| depos. | Shear stress, Pa | | | | | Time-to-pH 4.55, h | | | | |
| nr. | alone | +24649 | +25485 | +33192 | +YE | alone | +24649 | +25485 | +33192 | +YE |
| 24649 | 20 | | | | | 8 | | | | |
| 25485 | 56 | | | | | 12 | | | | |
| 33192 | 94 | | | | 88 | 14 | | | | 12 |
| 29291 | 39 | | 40 | 52 | 45 | 11 | | 12 | 12 | 8 |
| 33134 | 46 | 45 | 63 | | 53 | 18 | 13 | 13 | | 7 |
| 33135 | 43 | 28 | 65 | | 36 | 18 | 10 | 11 | | 8 |
| 33136 | 41 | 24 | 60 | | 37 | 18 | 11 | 12 | | 8 |
| 33137 | 48 | 39 | 48 | | 56 | 10 | 10 | 11 | | 8 |
| 33138 | 55 | 26 | 67 | | 36 | 18 | 10 | 11 | | 8 |
| 33139 | 2 | 42 | 52 | | 53 | 18 | 10 | 10 | | 7 |
| 33140 | 46 | 25 | 64 | | 44 | 15 | 10 | 11 | | 10 |
| 33142 | 56 | | | | | 13 | | | | |
| 33141 | | | 41 | | 38 | | | 15 | | 8 |
| 33183 | 72 | | | | | 18 | | | | |

[0907] The following texturing strains were classified as “slow acidifiers”, as they were able to reach pH 4.55 in more than 15 h, measured as described above, when grown alone (Table 1): DSM 33134, 33135, DSM 33136, 33138, 33139 and 33141. Yeast extract (YE, 0.2%) or a co-acidifier strain (DSM 24649 or DSM 25485) were added to the milk base to help the slow-acidifying strains to grow in milk. Yeast extract was obtained from Procelys (Yeast Extract NuCel® 545 MG, batch number 0005115910, batch AD 18 A05030).

[0908] Yeast extract can enhance the acidification speed, but it had a negative effect on the texture development when co-incubated with some of the strains under investigation, e.g., DSM 33135, DSM 33136, 33138. DSM 33138 lost ⅓ of its texture (expressed as shear stress) when yeast extract was present.

[0909] The aim with adding co-acidifier strains was to help the texturing strains to acidify the milk quicker, namely to reach a pH of about 4.55 in 15 h or less, and to not influence their texture negatively, as we often see in the presence of yeast extract. Also, different polysaccharides produced by two or more different strains grown together might have a synergistic effect on texture. For instance, DSM 33135 grown in the presence of 10% DSM 25485, as described above, did both result in an enhanced acidification speed but also in an enhanced texture: shear stress of a combination of DSM 33135 and DSM 25485 was significantly higher than that of DSM 25485 or DSM 33135 alone. Similarly shear stress of a combination of DSM 33140 and DSM 25485 was significantly higher than that of DSM 25485 or DSM 33140 alone. DSM 33137 had similar behavior in the presence of DSM 25485 (Table 1). As DSM 33134, 33135, DSM 33136, 33138, 33139 and 33141 are slow acidifiers when fermenting milk on their own (it took more than 15 h to reach a pH of 4.55, as described above), it was advantageous to test them in the presence of a co-acidifier strain, which would help to reduce the acidification time and, at the same time, would not negatively influence the generated viscosity, measured as shear stress, as in Table 1.

### Example 2. Rheology Measurement of Texture in Soy Milk

[0910] Rheology measurements of 14 L. lactic strains in soy milk supplemented with 2% glucose were performed.

[0911] The strains tested in this example were the following: DSM 24649 (non-texturing); DSM 33134; DSM 33135; DSM 33136; DSM 33137; DSM 33138; DSM 33139; DSM 33140; DSM 33141; DSM 33142; DSM 33183; DSM 33192; and DSM 25485.

[0912] The milk base used in was soy milk supplemented with 2% glucose: The soy milk was organic and unsweetened, obtained from Naturli′ Foods, with the following composition per 100 ml:

[0913] Fat: 2.1 g
[0914] Thereof saturated fat: 0.4 g

[0915] Carbohydrates: 0.1 g
[0916] Thereof sugars: 0.1 g

[0917] Fibers: 0.6 g

[0918] Protein: 3.7 g

[0919] Salt: 0.04 g.

[0920] The milk was already sterile, and no pre-treatment was performed to it before its use. It was supplemented with 2% glucose.

[0921] 1% volume overnight microbial culture (obtained by inoculating the microbial cultures in M17 broth supplemented with 2% glucose at 30° C.) was inoculated in soy milk with 2% glucose. The inoculation took place at 30° C. in 200-ml scale until pH^{˜}4.55 (see Table 3 for the specific pH reached by each culture), followed by cooling to 4° C. and storage until shear stress is measured, typically from 1-7 days, such as for 5 days. After the storage, the fermented milk was stirred gently by means of a stick fitted with a bored disc until homogeneity of the sample. Shear stress of the samples was assessed on a rheometer (Anton Paar Physica Rheometer with ASC, Automatic Sample Changer, Anton Paar® GmbH, Austria) using the following settings:
[0922] Wait time (to rebuild to somewhat original structure)
[0923] 5 minutes without oscillation or rotation
[0924] Rotation (to measure shear stress at 300 s⁻¹ etc.)
[0925] Y′=[0.2707−300] s⁻¹ and y′=[275−0.2707] s⁻¹

[0926] 21 measuring points over 210 s (on every 10 s) going up to 300 s′ and 21 measuring points over 210 s (one every 10 s) going down to 0.2707 s⁻¹. For the data analysis, the shear stress at shear rate 300 s⁻¹ was chosen.

[0927] The results of the shear stress (Pa) are shown in Table 2 below. “Alpro” refers to “Alpro naturell mild & creamy plantgurt”, a commercially-available fermented soy milk from “Al pro” (www.alpro.conn/se/produkter/vaxtbaserad-yoghurt-variant/nnild-creanny/nnild-creamy-naturell/), with the following composition per 100 ml:

| Energy | 210 kJ/50 kcal | |
|---|---|---|
| Fatt | 2.3 | g |
| Saturated fatty acids | 0.4 | g |
| Monounsaturated | 0.5 | g |
| Polyunsaturated | 1.4 | g |
| Carbohydrates | 2.1 | g |
| Sugar | 2.1 | g |
| Fibers | 1 | g |
| Protein | 4 | g |
| Salt | 0.3 | g |
| Vitamins | | |
| Vitamin D | 0.75 | μg |
| Vitamin B12 | 0.38 | μg |
| Minerals | | |
| Calcium | 120 | mg |

[0928] And with the following ingredients: Water, peeled SOYBEANS (7.9%), sugar, tricalcium citrate, stabilizer (pectin), acidity regulators (sodium citrate, citric acid), sea salt, antioxidants (tocopherol-rich extract, ascorbic acid esters of edible fatty acids), vitamins (B12, D2), yogurt culture (S. thermophilus, L. bulgaricus). Of note, Alpro comprises pectin, which increases the texture of the fermented milk. However, the base milk used in this example (soy milk supplemented with 2% glucose) does not include pectin.

TABLE 2
Shear stress (Pa) at several shear rates (s⁻¹) for selected texturing strains (1% of inoculum) incubated
in soy milk with 2% glucose, as described above.

| | Shear stress (Pa) at shear rate (s⁻¹) | | | | | | | | | | | | | | | | | | | | |
|---|---|---|---|---|---|---|---|---|---|---|---|---|---|---|---|---|---|---|---|---|---|
| Sample | 0,27 | 15 | 30 | 45 | 60 | 75 | 90 | 105 | 120 | 135 | 150 | 165 | 180 | 195 | 210 | 225 | 240 | 255 | 270 | 285 | 300 |
| Alpro | 17 | 36 | 40 | 42 | 44 | 46 | 47 | 48 | 49 | 50 | 51 | 52 | 53 | 54 | 55 | 56 | 56 | 57 | 58 | 60 | 60 |
| DSM 24649 | 7 | 16 | 18 | 19 | 20 | 20 | 21 | 21 | 21 | 21 | 22 | 22 | 22 | 23 | 23 | 23 | 23 | 24 | 24 | 24 | 24 |
| DSM 33134 | 6 | 18 | 21 | 24 | 27 | 28 | 30 | 31 | 32 | 32 | 33 | 33 | 34 | 34 | 35 | 35 | 35 | 36“ | 36 | 37 | 37 |
| DSM 33135 | 6 | 18 | 20 | 22 | 24 | 25 | 25 | 26 | 26 | 27 | 27 | 27 | 28 | 28 | 28 | 28 | 28 | 29 | 29 | 29 | 30 |
| DSM 33136 | 6 | 16 | 19 | 20 | 22 | 23 | 24 | 24 | 25 | 25 | 26 | 26 | 27 | 27 | 27 | 28 | 28 | 29 | 29 | 29 | 29 |
| DSM 33137 | 5 | 16 | 18 | 20 | 22 | 24 | 26 | 27 | 28 | 29 | 30 | 30 | 31 | 31 | 32 | 32 | 33 | 34 | 34 | 34 | 35 |
| DSM 33138 | 6 | 15 | 17 | 19 | 20 | 21 | 22 | 23 | 23 | 24 | 24 | 24 | 25 | 25 | 25 | 26 | 26 | 26 | 27 | 27 | 27 |
| DSM 33139 | 5 | 17 | 20 | 23 | 26 | 29 | 31 | 32 | 34 | 35 | 36 | 37 | 37 | 38 | 38 | 39 | 40 | 40 | 41 | 41 | 42 |
| DSM 33140 | 5 | 16 | 18 | 19 | 20 | 21 | 22 | 23 | 24 | 24 | 24 | 25 | 25 | 26 | 26 | 26 | 27 | 27 | 28 | 28 | 28 |
| DSM 33141 | 5 | 15 | 18 | 20 | 22 | 23 | 25 | 26 | 26 | 27 | 27 | 28 | 28 | 29 | 29 | 30 | 30 | 31 | 31 | 31 | 32 |
| DSM 33142 | 5 | 15 | 19 | 22 | 24 | 27 | 29 | 31 | 32 | 34 | 35 | 36 | 37 | 37 | 38 | 39 | 39 | 40 | 41 | 41 | 42 |
| DSM 33183 | 5 | 18 | 25 | 31 | 36 | 40 | 43 | 46 | 48 | 50 | 52 | 53 | 55 | 56 | 56 | 57 | 57 | 58 | 58 | 59 | 59 |
| DSM 25485 | 6 | 17 | 25 | 30 | 34 | 38 | 41 | 43 | 45 | 47 | 48 | 49 | 50 | 51 | 52 | 52 | 53 | 53 | 54 | 54 | 54 |
| DSM 33192 | 5 | 16 | 21 | 25 | 29 | 32 | 35 | 37 | 39 | 40 | 41 | 42 | 43 | 43 | 44 | 45 | 46 | 46 | 46 | 47 | 47 |

[0929] As it can be seen from Tables 2, all selected texturing strains showed higher shear stress when fermenting soy milk supplemented with glucose 2% than the negative control (DSM24649).

[0930] Finally, the pH reached by each of the strains, and the time to this pH (in h) is shown in Table 3.

TABLE 3
Time-to-pH for selected texturing strains (1% of inoculum) incubated
in soy milk supplemented with 2% glucose, as described above.

| Strain (DSM) | pH reached | Time to pH, h |
|---|---|---|
| Alpro | | |
| DSM 24649 + 2% Glc | 4.55 | 8 |
| DSM 33134 + 2% Glc | 4.56 | 20.5 |
| DSM 33135 + 2% Glc | 4.68 | 21.5 |
| DSM 33136 + 2% Glc | 4.64 | 20.5 |
| DSM 33137 + 2% Glc | 4.40 | 8 |
| DSM 33138 + 2% Glc | 4.71 | 21.5 |
| DSM 33139 + 2% Glc | 4.58 | 15.5 |
| DSM 33140 + 2% Glc | 4.55 | 11 |
| DSM 33141 + 2% Glc | 4.58 | 16 |
| DSM 33142 + 2% Glc | 4.55 | 12 |
| DSM 33183 + 2% Glc | 4.86 | 20.5 |
| DSM 25485 + 2% Glc | 4.55 | 16 |
| DSM 33192 + 2% Glc | 4.55 | 14 |

### Example 3. Sequencing Genomes of Lactococcal Strains

[0931] The genome of the strains was sequenced in-house at Chr. Hansen as described by Agersø et al. (Agersoe et al., 2018). In brief, total DNA was purified and used to prepare a 250-bp paired-end library for genome sequencing using Illumina MiSeq system. The sequence reads were subjected to quality trimming (Phred score<25) and assembled into contigs using the de novo assembly algorithm in CLC Genomics Workbench, version 10.1.1 (CLC bio, Qiagen Bioinformatics). The resulting genome assembly was filtered by removing contigs with coverage of <15X and/or <20% of the median coverage of the assembly. The consensus sequence of the remaining contigs was exported in FASTA format, which is referred to as the draft genome sequence, and used in the subsequent sequence analysis.

### Example 4. Characterization of the Eps Gene Clusters of the Lactococcal Strains

[0932] Since an enhanced texture is associated with the production of polysaccharides, mining for eps gene clusters was performed. Mobile genetic elements (IS elements also called transposases) flanking or within the operon are consistently present in the architecture of eps gene clusters, but they are not involved in the polysaccharide biosynthesis. The biosynthesis of exocellular polysaccharides in L. lactic occurs via the Wzy-dependent pathway. Here, we used the nomenclature suggested by Zeidan et al. (2017). The conserved genes in the beginning of the eps gene cluster were denominated epsRXCDB, and those at the end, epsL and lytR, while the polymerase was named wzy, and the flippase, wzx.

[0933] Genes located at the 5′ end of the eps gene cluster epsRXCDB, which are involved in the modulation and assembly machinery of polysaccharide biosynthesis, as well as epsL and lytR at the 3′ end, displayed the highest level of conservation. The genes of the variable part including polymerase wzy, flippase wzx, and glucosyltransferases (GT) or other polymer-modifying enzymes, were rarely similar between the strains. The common denominator for the texturing strains is that they all contain the genes required for the polysaccharide production, e.g. epsCDBE-wzy-wzx and GT (Zeidan et al. 2017).

[0934] The eps gene cluster of DSM 33134 is 18254 bp long and contains 20 open reading frames (ORF) corresponding to eight conserved genes (epsRXCDBEL, lytR) and 12 genes of the variable part. Genes of the variable part likely involved in polysaccharide biosynthesis include three glycosyltransferases (GT1, GT2, GT3), nucleotide sugar dehydrogenase, polymerase wzy, and flippase (polysaccharide transporter) wzx. The three GT together with a putative nucleotide sugar dehydrogenase are potentially involved in sequential building of the repeating unit, although their specific functions and therefore order of action have not been demonstrated. Five IS elements are also a part of the eps gene cluster of DSM 33134.

[0935] The eps gene cluster of DSM 33135 is 27444 bp long and contains 31 ORF corresponding to eight conserved genes (epsRXCDBEL, lytR) and 19 genes of the variable part. Genes of the variable part likely involved in polysaccharide biosynthesis include five glycosyltransferases (GT1, GT2, GT3, GT4, GT5), dTDP-glucose 4,6-dehydratase, dTDP-4-dehydrorhamnose reductase, dTDP-4-dehydrorhamnose 3,5-epimerase, DUF1919, DUF4422, UDP-galactopyranose mutase, polymerase wzy, and flippase (polysaccharide transporter) wzx. Nine IS elements are also a part of the eps gene cluster of DSM 33135. VanZ family protein is usually found in the eps gene clusters of S. thermophilus, but not in L. lactis.

[0936] The eps gene cluster of DSM 33136 is 18365 bp long and contains 18 ORF corresponding to eight conserved genes (epsRXCDBEL, lytR) and 10 genes of the variable part. Genes of the variable part likely involved in polysaccharide biosynthesis include three glycosyltransferases (GT1, GT2, GT3), polysaccharide pyruvyl transferase, polymerase wzy, and flippase (polysaccharide transporter) wzx. The three GT together with a putative polysaccharide pyruvyl transferase are potentially involved in sequential building of the repeating unit, although their specific functions and therefore order of action have not been demonstrated. Two IS elements are also a part of the eps gene cluster of DSM 33136. VanZ family protein is usually found in the eps gene clusters of S. thermophilus, but not in L. lactis.

[0937] The eps gene cluster of DSM 33137 is 20584 bp long and contains 21 ORF corresponding to eight conserved genes (epsRXCDBEL, lytR) and 13 genes of the variable part. Genes of the variable part likely involved in polysaccharide biosynthesis include four glycosyltransferases (GT1, GT2, GT3, GT4), Cre-2/I-branching protein, polymerase wzy, and flippase (polysaccharide transporter) wzx. Five IS elements are also a part of the eps gene cluster of DSM 33137. VanZ family protein is usually found in the eps gene clusters of S. thermophilus, but not in L. lactis.

[0938] The eps gene cluster of DSM 33138 is 21315 bp long and contains 23 ORF corresponding to seven conserved genes (epsRXCDBE, lytR) and 16 genes of the variable part. Genes of the variable part likely involved in polysaccharide biosynthesis include four glycosyltransferases (GT1, GT2, GT3, GT4), DUF1972, DUF4422, DUF1919, UDP-galactopyranose mutase, dTDP-4-dehydrorhamnose 3,5-epimerase, dTDP-glucose 4,6-dehydratase, dTDP-4-dehydrorhamnose reductase, polymerase wzy, and flippase (polysaccharide transporter) wzx. Three IS elements are also a part of the eps gene cluster of DSM 33138. VanZ family protein is usually found in the eps gene clusters of S. thermophilus, but not in L. lactis.

[0939] The eps gene cluster of DSM 33139 is 27175 bp long and contains 29 ORF corresponding to eight conserved genes (epsRXCDBEL, lytR) and 21 genes of the variable part. Genes of the variable part likely involved in polysaccharide biosynthesis include six glycosyltransferases (GT1, GT2, GT3, GT4, GT5, GT6), two NAD-dependent epimerases, nucleotide sugar dehydrogenase, RfbA, dTDP-glucose 4,6-dehydratase, dTDP-4-dehydrorhamnose 3,5-epimerase, two acyltransferases, dTDP-4-dehydrorhamnose reductase, nucleotidyltransferase, polymerase wzy, and flippase (polysaccharide transporter) wzx. VanZ family protein is also a part of the eps gene cluster of DSM 33139; it is usually found in the eps gene clusters of S. thermophilus, but not in L. lactis.

[0940] The eps gene cluster of DSM 33140 is 18226 bp long and contains 19 ORF corresponding to eight conserved genes (epsRXCDBEL, lytR) and 11 genes of the variable part. Genes of the variable part likely involved in polysaccharide biosynthesis include three glycosyltransferases (GT1, GT2, GT3), UDP-N-acetylglucosamine-LPS N-acetylglucosamine transferase, Capsule biosynthesis protein CapC, polymerase wzy and a second polymerase-like sequence wzy1, which is likely to short to be functional, and flippase (polysaccharide transporter) wzx. Three IS elements are also a part of the eps gene cluster of DSM 33140.

[0941] The eps gene cluster of DSM 33141 is 24364 bp long and contains 25 ORF corresponding to nine conserved genes (epsRXCDBE1E2L, lytR) and 16 genes of the variable part. Genes of the variable part likely involved in polysaccharide biosynthesis include six glycosyltransferases (GT1, GT2, GT3, GT4, GT5, GT6), acetyltransferase, nucleotide sugar dehydrogenase, acyltransferase, polymerase wzy, and flippase (polysaccharide transporter) wzx. Two IS elements are also a part of the eps gene cluster of DSM 33141.

[0942] The eps gene cluster of DSM 33142 is 16953 bp long and contains 19 ORF corresponding to nine conserved genes (epsRXCDBE1E2L, lytR) and 10 genes of the variable part. Genes of the variable part likely involved in polysaccharide biosynthesis include three glycosyltransferases (GT1, GT2, GT3), nucleotide sugar dehydrogenase, acetyltransferase, polymerase wzy, and flippase (polysaccharide transporter) wzx. Three IS elements are also a part of the eps gene cluster of DSM 33142.

[0943] The eps gene cluster of DSM 33183 is 16476 bp long and contains 19 ORF corresponding to eight conserved genes (epsRCDBE1E2L, lytR) and 10 genes of the variable part. Genes of the variable part likely involved in polysaccharide biosynthesis include three glycosyltransferases (GT1, GT2, GT3), nucleotide sugar dehydrogenase, acetyltransferase, polymerase wzy, and flippase (polysaccharide transporter) wzx. Three IS elements are also a part of the eps gene cluster of DSM 33183.

[0944] BLAST analysis was used to make annotations of open reading frames (ORF) of the strains from the CHCC culture collection. Comparative analysis of the eps gene clusters was performed using cd-hit tool (weizhongli-lab.org/cd-hit/). The % identity of sequences was calculated using percent identity matrix by Clustal Omega (www.ebi.ac.uk/Tools/msa/clustalo/).

[0945] The novel texturing strains have eps gene clusters which are not similar to those in the literature or on the NCBI web-site. Also, the eps gene clusters are unique compared to the known texturing strains from the Chr. Hansen culture collection (FIG. 1).

[0946] Deposit and Expert Solution

[0947] The Applicant requests that a sample of the deposited microorganisms stated below may only be made available to an expert, until the date on which the patent is granted. In particular, the Applicant requests that the availability of the deposited microorganism referred to in Rule 33 EPC shall be effected only by the issue of a sample to an independent expert nominated by the requester (Rule 32(1) EPC).

TABLE 4
Deposits made by the Applicant, CHR. HANSEN A/S, at a
Depositary Institution having acquired the status of
International Depositary Authority under the Budapest
Treaty on the International Recognition of the Deposit
of Microorganisms for the Purposes of Patent Procedure:
Leibniz Institute DSMZ-German Collection of Microorganisms
and Cell Cultures Inhoffenstr. 7B, 38124 Braunschweig, Germany.

| Strain | Accession No. | Deposit date |
|---|---|---|
| Lactococcus lactis subsp. cremoris | DSM 25485 | Dec. 14, 2011 |
| Lactococcus lactis subsp. cremoris | DSM 24649 | Mar. 15, 2011 |
| Lactococcus lactis subsp. lactis | DSM 29291 | Aug. 21, 2014 |
| Lactococcus lactis | DSM 33134 | May 28, 2019 |
| Lactococcus lactis | DSM 33135 | May 28, 2019 |
| Lactococcus lactis | DSM 33136 | May 28, 2019 |
| Lactococcus lactis | DSM 33137 | May 28, 2019 |
| Lactococcus lactis | DSM 33138 | May 28, 2019 |
| Lactococcus lactis | DSM 33139 | May 28, 2019 |
| Lactococcus lactis | DSM 33140 | May 28, 2019 |
| Lactococcus lactis | DSM 33141 | May 28, 2019 |
| Lactococcus lactis | DSM 33192 | Jul. 3, 2019 |
| Lactococcus lactis | DSM 33142 | May 28, 2019 |
| Lactococcus lactis | DSM 33183 | Jun. 19, 2019 |
| Lactococcus lactis | DSM 33201 | Jul. 3, 2019 |
| Lactococcus lactis | DSM 33133 | May 28, 2019 |
| Lactococcus lactis | DSM 33225 | Jul. 3, 2019 |
| Lactococcus lactis | DSM 33222 | Jul. 3, 2019 |
| Lactococcus lactis | DSM 33203 | Jul. 3, 2019 |
| Lactococcus lactis | DSM 33200 | Jul. 3, 2019 |
| Lactococcus lactis | DSM 33193 | Jul. 3, 2019 |
| Lactococcus lactis | DSM 33196 | Jul. 3, 2019 |
| Lactococcus lactis | DSM 33197 | Jul. 3, 2019 |
| Lactococcus lactis | DSM 33204 | Jul. 3, 2019 |
| Lactococcus lactis | DSM 33205 | Jul. 3, 2019 |
| Lactococcus lactis | DSM 33220 | Jul. 3, 2019 |
| Lactococcus lactis | DSM 33221 | Jul. 3, 2019 |
| Lactococcus lactis | DSM 33218 | Jul. 3, 2019 |
| Lactococcus lactis | DSM 33219 | Jul. 3, 2019 |
| Lactococcus lactis | DSM 33224 | Jul. 3, 2019 |
| Lactococcus lactis | DSM 33202 | Jul. 3, 2019 |
| Lactococcus lactis | DSM 33195 | Jul. 3, 2019 |
| Lactococcus lactis | DSM 33194 | Jul. 3, 2019 |
| Lactococcus lactis | DSM 33226 | Jul. 3, 2019 |
| Lactococcus lactis | DSM 33223 | Jul. 3, 2019 |

### REFERENCES

[0948] 1. Zeidan et al., 2017, Polysaccharide production by lactic acid bacteria: from genes to industrial applications. FEMS Microbiol Rev 41: 168-200.
[0949] 2. Bentley et al., 2006, Genetic analysis of the capsular biosynthetic locus from all 90 pneumococcal serotypes, PLoS Genet. 2:e31.
[0950] 3. Dabour and LaPointe, 2005, Identification and Molecular Characterization of the Chromosomal Exopolysaccharide Biosynthesis Gene Cluster from Lactococcus lactis subsp. cremoris SMQ-461, Appl Environ Microbiol., 71: 7414-7425.
[0951] 4. Kleerebezem M., et al., 2002, Metabolic engineering of Lactococcus lactis: the impact of genomics and metabolic modelling, Journal of Biotechnology 98 (2002) 199-213.
[0952] 5. Nierop Groot M. N., Kleerebezem M., 2007, Mutational analysis of the Lactococcus lactis NIZO B40 exopolysaccharide (EPS) gene cluster: EPS biosynthesis correlates with unphosphorylated EpsB, J Appl Microbiol., 103: 2645-2656.
[0953] 6. Pan D., Mei X., 2010, Antioxidant activity of an exopolysaccharide purified from Lactococcus lactis subsp. lactis 12, Carbohydrate Polymers, 80: 908-914.
[0954] 7. Poulsen et al., 2019, High-throughput screening for texturing Lactococcus strains, FEMS Microbiol Lett., 366(2).
[0955] 8. Suzuki C. et al., 2013, Novel exopolysaccharides produced by Lactococcus lactis subsp. lactis, and the diversity of epsE genes in the exopolysaccharide biosynthesis gene clusters, Biosci Biotechnol Biochem., 77: 2013-2018.
[0956] 9. Tangyu et al., 2019, Fermentation of plant-based milk alternatives for improved flavour and nutritional value, Applied Microbiology and Biotechnology, 103:9263-9275.
[0957] 10. van Kranenburg R. et al., 1999, Functional analysis of glycosyltransferase genes from Lactococcus lactis and other gram-positive cocci: complementation, expression, and diversity, J Bacteriol., 181: 6347-6353.
[0958] 11. Whittall J. J. et al., 2015, Topology of Streptococcus pneumoniae CpsC, a Polysaccharide co-polymerase and BY-kinase adaptor protein, J Bacteriol 197: 120-127.
[0959] 12. Agersoe Y et al. (2018) Antimicrobial susceptibility testing and tentative epidemiological cutoff values for five bacillus species relevant for use as animal feed additives or for plant protection, Appl Environ Microbiol, 84 (19).

1. A Lactococcus lactis lactic acid bacterium strain comprising an active eps gene cluster capable of producing exopolysaccharide (EPS), wherein the eps gene cluster comprises nucleotide sequences selected from (i) to (x):
(i) (a): a nucleotide sequence encoding a polypeptide having polymerase activity and having at least 95% identity with the amino acid sequence encoded by the nucleotide sequence of SEQ ID NO: 11 (herein termed wzy);
(b): a nucleotide sequence encoding a polypeptide having polysaccharide transporter activity and having at least 95% identity with the amino acid sequence encoded by the nucleotide sequence of SEQ ID NO: 17 (herein termed wzx); and
(c): a nucleotide sequence encoding a polypeptide having glycosyltransferase (GT) activity comprising:
(c1): a nucleotide sequence having at least 95% identity with the amino acid sequence encoded by the nucleotide sequence of SEQ ID NO: 9 (herein termed GT1);
(c2): a nucleotide sequence having at least 95% identity with the amino acid sequence encoded by the nucleotide sequence of SEQ ID NO: 13 (herein termed GT2); and
(c3): a nucleotide sequence having at least 95% identity with the amino acid sequence encoded by the nucleotide sequence of SEQ ID NO: 15 (herein termed GT3);
(ii) (a): a nucleotide sequence encoding a polypeptide having polymerase activity and having at least 95% identity with the amino acid sequence encoded by nucleotides 13939-15042 of SEQ ID NO:199 (herein termed wzy);
(b): a nucleotide sequence encoding a polypeptide having polysaccharide transporter activity and having at least 95% identity with the amino acid sequence encoded by nucleotides 26029-27444 of the complementary strand of SEQ ID NO:199 (herein termed wzx); and
(c): a nucleotide sequence encoding a polypeptide having glycosyltransferase (GT) activity comprising:
(c1): a nucleotide sequence having at least 95% identity with the amino acid sequence encoded by nucleotides 4174-4824 of SEQ ID NO:199 (herein termed GT1);
(c2): a nucleotide sequence having at least 95% identity with the amino acid sequence encoded by nucleotides 7276-8508 of SEQ ID NO:199(herein termed GT2);
(c3): a nucleotide sequence having at least 95% identity with the amino acid sequence encoded by nucleotides 11042-12391 of SEQ ID NO:199 (herein termed GT3);
(c4): a nucleotide sequence having at least 95% identity with the amino acid sequence encoded by nucleotides 13008-13934 of SEQ ID NO:199 (herein termed GT4); and
(c5): a nucleotide sequence having at least 95% identity with the amino acid sequence encoded by nucleotides 18528-19508 of SEQ ID NO:199 (herein termed GT5);
(iii) (a): a nucleotide sequence encoding a polypeptide having polymerase activity and having at least 95% identity with the amino acid sequence encoded by the nucleotide sequence of SEQ ID NO: 39 (herein termed wzy);
(b): a nucleotide sequence encoding a polypeptide having polysaccharide transporter activity and having at least 95% identity with the amino acid sequence encoded by the nucleotide sequence of SEQ ID NO: 45 (herein termed wzx);
(c): a nucleotide sequence encoding a polypeptide having glycosyltransferase (GT) activity comprising:
(c1): a nucleotide sequence having at least 95% identity with the amino acid sequence encoded by the nucleotide sequence of SEQ ID NO: 37 (herein termed GT1);
(c2): a nucleotide sequence having at least 95% identity with the amino acid sequence encoded by the nucleotide sequence of SEQ ID NO: 41 (herein termed GT2); and
(c3): a nucleotide sequence having at least 95% identity with the amino acid sequence encoded by the nucleotide sequence of SEQ ID NO: 43 (herein termed GT3);
(iv) (a): a nucleotide sequence encoding a polypeptide having polymerase activity and having at least 95% identity with the amino acid sequence encoded by the nucleotide sequence of SEQ ID NO: 163 (herein termed wzy);
(b): a nucleotide sequence encoding a polypeptide having polysaccharide transporter activity and having at least 95% identity with the amino acid sequence encoded by the nucleotide sequence of SEQ ID NO: 169 (herein termed wzx); and
(c): a nucleotide sequence encoding a polypeptide having glycosyltransferase (GT) activity comprising:
(c1): a nucleotide sequence having at least 95% identity with the amino acid sequence encoded by the nucleotide sequence of SEQ ID NO: 161 (herein termed GT1);
(c2): a nucleotide sequence having at least 95% identity with the amino acid sequence encoded by the nucleotide sequence of SEQ ID NO: 165 (herein termed GT2);
(c3): a nucleotide sequence having at least 95% identity with the amino acid sequence encoded by the nucleotide sequence of SEQ ID NO: 167 (herein termed GT3); and
(c4) a nucleotide sequence having at least 95% identity with the amino acid sequence encoded by the nucleotide sequence of SEQ ID NO: 181 (herein termed GT4);
(v) (a): a nucleotide sequence encoding a polypeptide having polymerase activity and having at least 95% identity with the amino acid sequence encoded by nucleotides 13939-15042 of SEQ ID NO: 224 (herein termed wzy); and
(c): a nucleotide sequence encoding a polypeptide having glycosyltransferase (GT) activity comprising:
(c1): a nucleotide sequence having at least 95% identity with the amino acid sequence encoded by nucleotides 4174-4824 of SEQ ID NO: 224 (herein termed GT1);
(c2): a nucleotide sequence having at least 95% identity with the amino acid sequence encoded by nucleotides 11042-12391 of SEQ ID NO: 224 (herein termed GT2);
(c3): a nucleotide sequence having at least 95% identity with the amino acid sequence encoded by nucleotides 13008-13934 of SEQ ID NO: 224 (herein termed GT3); and
(c4): a nucleotide sequence having at least 95% identity with the amino acid sequence encoded by nucleotides 18527-19507 of SEQ ID NO: 224 (herein termed GT4);
(vi) (a): a nucleotide sequence encoding a polypeptide having polymerase activity and having at least 95% identity with the amino acid sequence encoded by the nucleotide sequence of SEQ ID NO: 67 (herein termed wzy);
(b): a nucleotide sequence encoding a polypeptide having polysaccharide transporter activity and having at least 95% identity with the amino acid sequence encoded by the nucleotide sequence of SEQ ID NO: 73 (herein termed wzx);
(c): a nucleotide sequence encoding a polypeptide having glycosyltransferase (GT) activity comprising:
(c1): a nucleotide sequence having at least 95% identity with the amino acid sequence encoded by the nucleotide sequence of SEQ ID NO: 65 (herein termed GT1);
(c2): a nucleotide sequence having at least 95% identity with the amino acid sequence encoded by the nucleotide sequence of SEQ ID NO: 69 (herein termed GT2); and
(c3): a nucleotide sequence having at least 95% identity with the amino acid sequence encoded by the nucleotide sequence of SEQ ID NO: 71 (herein termed GT3);
(c4): a nucleotide sequence having at least 95% identity with the amino acid sequence encoded by the nucleotide sequence of SEQ ID NO: 85 (herein termed GT4);
(c5): a nucleotide sequence having at least 95% identity with the amino acid sequence encoded by the nucleotide sequence of SEQ ID NO: 87 (herein termed GT5); and
(c6): a nucleotide sequence having at least 95% identity with the amino acid sequence encoded by the nucleotide sequence of SEQ ID NO: 89 (herein termed GT6);
(vii) (a): a nucleotide sequence encoding a polypeptide having polymerase activity and having at least 95% identity with the amino acid sequence encoded by nucleotides 5833-6927 of SEQ ID NO: 244 (herein termed wzy);
and
(c): a nucleotide sequence encoding a polypeptide having glycosyltransferase (GT) activity comprising:
(c1): a nucleotide sequence having at least 95% identity with the amino acid sequence encoded by nucleotides 4617-5123 of SEQ ID NO: 244 (herein termed GT1); and
(c2): a nucleotide sequence having at least 95% identity with the amino acid sequence encoded by nucleotides 5120-5827 of SEQ ID NO: 244 (herein termed GT2);
(viii) (a): a nucleotide sequence encoding a polypeptide having polymerase activity and having at least 95% identity with the amino acid sequence encoded by the nucleotide sequence of SEQ ID NO: 123 (herein termed wzy);
(b): a nucleotide sequence encoding a polypeptide having polysaccharide transporter activity and having at least 95% identity with the amino acid sequence encoded by the nucleotide sequence of SEQ ID NO: 129 (herein termed wzx);
(c): a nucleotide sequence encoding a polypeptide having glycosyltransferase (GT) activity comprising:
(c1): a nucleotide sequence having at least 95% identity with the amino acid sequence encoded by the nucleotide sequence of SEQ ID NO: 121 (herein termed GT1);
(c2): a nucleotide sequence having at least 95% identity with the amino acid sequence encoded by the nucleotide sequence of SEQ ID NO: 125 (herein termed GT2); and
(c3): a nucleotide sequence having at least 95% identity with the amino acid sequence encoded by the nucleotide sequence of SEQ ID NO: 127 (herein termed GT3);
(c4): a nucleotide sequence having at least 95% identity with the amino acid sequence encoded by the nucleotide sequence of SEQ ID NO: 143 (herein termed GT4);
(c5): a nucleotide sequence having at least 95% identity with the amino acid sequence encoded by the nucleotide sequence of SEQ ID NO: 145 (herein termed GT5); and
(c6): a nucleotide sequence having at least 95% identity with the amino acid sequence encoded by the nucleotide sequence of SEQ ID NO: 147 (herein termed GT6);
(ix) (a): a nucleotide sequence encoding a polypeptide having polymerase activity and having at least 95% identity with the amino acid sequence encoded by nucleotides 11201-12349 of the complementary strand of SEQ ID NO: 257 (herein termed wzy);
(b): a nucleotide sequence encoding a polypeptide having polysaccharide transporter activity and having at least 95% identity with the amino acid sequence encoded by nucleotides 15538-16953 of the complementary strand of SEQ ID NO: 257 (herein termed wzx); and
(c): a nucleotide sequence encoding a polypeptide having glycosyltransferase (GT) activity comprising:
(c1): a nucleotide sequence having at least 95% identity with the amino acid sequence encoded by nucleotides 9726-10673 of the complementary strand of SEQ ID NO: 257 (herein termed GT1);
(c2): a nucleotide sequence having at least 95% identity with the amino acid sequence encoded by nucleotides 12336-13421 of the complementary strand of SEQ ID NO: 257 (herein termed GT2); and
(c3): a nucleotide sequence having at least 95% identity with the amino acid sequence encoded by nucleotides 13418-14260 of the complementary strand of SEQ ID NO: 257 (herein termed GT3);
(x) (a): a nucleotide sequence encoding a polypeptide having polymerase activity and having at least 95% identity with the amino acid sequence encoded by nucleotides 10707-11846 of the complementary strand of SEQ ID NO: 274 (herein termed wzy);
(b): a nucleotide sequence encoding a polypeptide having polysaccharide transporter activity and having at least 95% identity with the amino acid sequence encoded by nucleotides 15037-16476 of the complementary strand of SEQ ID NO: 274 (herein termed wzx); and
(c): a nucleotide sequence encoding a polypeptide having glycosyltransferase (GT) activity comprising:
(c1): a nucleotide sequence having at least 95% identity with the amino acid sequence encoded by nucleotides 9232-10179 of the complementary strand of SEQ ID NO: 274 (herein termed GT1);
(c2): a nucleotide sequence having at least 95% identity with the amino acid sequence encoded by nucleotides 11833-12918 of the complementary strand of SEQ ID NO: 274 (herein termed GT2); and
(c3): a nucleotide sequence having at least 95% identity with the amino acid sequence encoded by nucleotides 12915-13757 of the complementary strand of SEQ ID NO: 274 (herein termed GT3).

2. The Lactococcus lactis lactic acid bacterium strain according to claim 1, wherein the eps gene cluster comprises nucleotide sequences selected from (i) to (x):
(i) (a): a nucleotide sequence encoding a polypeptide having polymerase activity and having at least 95% identity with the amino acid sequence encoded by the nucleotide sequence of SEQ ID NO: 11 (herein termed wzy);
(b): a nucleotide sequence encoding a polypeptide having polysaccharide transporter activity and having at least 95% identity with the amino acid sequence encoded by the nucleotide sequence of SEQ ID NO: 17 (herein termed wzx);
(c): a nucleotide sequence encoding a polypeptide having glycosyltransferase (GT) activity comprising:
(c1): a nucleotide sequence having at least 95% identity with the amino acid sequence encoded by the nucleotide sequence of SEQ ID NO: 9 (herein termed GT1);
(c2): a nucleotide sequence having at least 95% identity with the amino acid sequence encoded by the nucleotide sequence of SEQ ID NO: 13 (herein termed GT2); and
(c3): a nucleotide sequence having at least 95% identity with the amino acid sequence encoded by the nucleotide sequence of SEQ ID NO: 15 (herein termed GT3); and
(d): a nucleotide sequence having at least 95%, identity with the amino acid sequence encoded by the nucleotide sequence of SEQ ID NO: 23 (herein termed putative nucleotide sugar dehydrogenase protein);
(ii) (a): a nucleotide sequence encoding a polypeptide having polymerase activity and having at least 95% identity with the amino acid sequence encoded by nucleotides 13939-15042 of SEQ ID NO:199 (herein termed wzy);
(b): a nucleotide sequence encoding a polypeptide having polysaccharide transporter activity and having at least 95% identity with the amino acid sequence encoded by nucleotides 26029-27444 of the complementary strand of SEQ ID NO:199 (herein termed wzx);
(c): at least one nucleotide sequence encoding a polypeptide having glycosyltransferase (GT) activity selected from:
(c1): a nucleotide sequence having at least 95% identity with the amino acid sequence encoded by nucleotides 4174-4824 of SEQ ID NO:199 (herein termed GT1);
(c2): a nucleotide sequence having at least 95% identity with the amino acid sequence encoded by nucleotides 7276-8508 of SEQ ID NO:199 (herein termed GT2);
(c3): a nucleotide sequence having at least 95% identity with the amino acid sequence encoded by nucleotides 11042-12391 of SEQ ID NO:199 (herein termed GT3);
(c4): a nucleotide sequence having at least 95% identity with the amino acid sequence encoded by nucleotides 13008-13934 of SEQ ID NO:199 (herein termed GT4);
(c5): a nucleotide sequence having at least 95% identity with the amino acid sequence encoded by nucleotides 18528-19508 of SEQ ID NO:199 (herein termed GT5);
(d): a nucleotide sequence encoding a polypeptide having dTDP-glucose 4,6-dehydratase activity and having at least 95% identity with the amino acid sequence encoded by nucleotides 4784-5695 of SEQ ID NO:199 (herein termed dTDP-glucose 4,6-dehydratase);
(e): a nucleotide sequence encoding a polypeptide having dTDP-4-dehydrorhamnose reductase activity and having at least 95% identity with the amino acid sequence encoded by nucleotides 5717-6631 of SEQ ID NO:199 (herein termed dTDP-4-dehydrorhamnose reductase);
(f): a nucleotide sequence encoding a polypeptide having dTDP-4-dehydrorhamnose 3,5-epimerase activity and having at least 95% identity with the amino acid sequence encoded by nucleotides 6586-7257 of SEQ ID NO:199 (herein termed dTDP-4-dehydrorhamnose 3,5-epimerase);
(g): a nucleotide sequence encoding polypeptide DUF1919 and having at least 95% identity with the amino acid sequence encoded by nucleotides 8515-9144 of SEQ ID NO:199 (herein termed DUF1919);
(h): a nucleotide sequence encoding polypeptide DUF4422 and having at least 95% identity with the amino acid sequence encoded by nucleotides 10271-11029 of SEQ ID NO:199 (herein termed DUF4422); and
(i): a nucleotide sequence encoding a polypeptide having UDP-galactopyranose mutase activity and having at least 95% identity with the amino acid sequence encoded by nucleotides 9159-10274 of SEQ ID NO:199 (herein termed UDP-galactopyranose mutase);
(iii) (a): a nucleotide sequence encoding a polypeptide having polymerase activity and having at least 95% identity with the amino acid sequence encoded by the nucleotide sequence of SEQ ID NO: 39 (herein termed wzy);
(b): a nucleotide sequence encoding a polypeptide having polysaccharide transporter activity and having at least 95% identity with the amino acid sequence encoded by the nucleotide sequence of SEQ ID NO: 45 (herein termed wzx);
(c): a nucleotide sequence encoding a polypeptide having glycosyltransferase (GT) activity comprising:
(c1): a nucleotide sequence having at least 95% identity with the amino acid sequence encoded by the nucleotide sequence of SEQ ID NO: 37 (herein termed GT1);
(c2): a nucleotide sequence having at least 95% identity with the amino acid sequence encoded by the nucleotide sequence of SEQ ID NO: 41 (herein termed GT2); and
(c3): a nucleotide sequence having at least 95% identity with the amino acid sequence encoded by the nucleotide sequence of SEQ ID NO: 43 (herein termed GT3); and
(d): a nucleotide sequence having polysaccharide pyruvyl transferase activity and having at least 95% identity with the amino acid sequence encoded by the nucleotide sequence of SEQ ID NO: 51 (herein termed polysaccharide pyruvyl transferase family protein);
(iv) (a): a nucleotide sequence encoding a polypeptide having polymerase activity and having at least 95% identity with the amino acid sequence encoded by the nucleotide sequence of SEQ ID NO: 163 (herein termed wzy);
(b): a nucleotide sequence encoding a polypeptide having polysaccharide transporter activity and having at least 95% identity with the amino acid sequence encoded by the nucleotide sequence of SEQ ID NO: 169 (herein termed wzx);
(c): a nucleotide sequence encoding a polypeptide having glycosyltransferase (GT) activity comprising:
(c1): a nucleotide sequence having at least 95% identity with the amino acid sequence encoded by the nucleotide sequence of SEQ ID NO: 161 (herein termed GT1);
(c2): a nucleotide sequence having at least 95% identity with the amino acid sequence encoded by the nucleotide sequence of SEQ ID NO: 165 (herein termed GT2);
(c3): a nucleotide sequence having at least 95% identity with the amino acid sequence encoded by the nucleotide sequence of SEQ ID NO: 167 (herein termed GT3); and
(c4) a nucleotide sequence having at least 95% identity with the amino acid sequence encoded by the nucleotide sequence of SEQ ID NO: 181 (herein termed GT4); and
(d) a nucleotide sequence encoding a polypeptide having at least 95% identity with the amino acid sequence encoded by the nucleotide sequence of SEQ ID NO: 175 (herein termed Core-2/I-Branching protein);
(v) (a): a nucleotide sequence encoding a polypeptide having polymerase activity and having at least 95% identity with the amino acid sequence encoded by nucleotides 13939-15042 of SEQ ID NO: 224 (herein termed wzy);
(c): at least one nucleotide sequence encoding a polypeptide having glycosyltransferase (GT) activity selected from:
(c1): a nucleotide sequence having at least 95% identity with the amino acid sequence encoded by nucleotides 4174-4824 of SEQ ID NO: 224 (herein termed GT1);
(c2): a nucleotide sequence having at least 95% identity with the amino acid sequence encoded by nucleotides 11042-12391 of SEQ ID NO: 224 (herein termed GT2);
(c3): a nucleotide sequence having at least 95% identity with the amino acid sequence encoded by nucleotides 13008-13934 of SEQ ID NO: 224 (herein termed GT3); and
(c4): a nucleotide sequence having at least 95% identity with the amino acid sequence encoded by nucleotides 18527-19507 of SEQ ID NO: 224 (herein termed GT4);
(d): a nucleotide sequence encoding polypeptide DUF1972, and having at least 95% identity with the amino acid sequence encoded by nucleotides 7276-8508 of SEQ ID NO: 224 (herein termed DUF1972);
(e): a nucleotide sequence encoding polypeptide DUF4422 and having at least 95% identity with the amino acid sequence encoded by nucleotides 10271-11029 of SEQ ID NO: 224 (herein termed DUF4422);
(f): a nucleotide sequence encoding polypeptide DUF1919 and having at least 95% identity with the amino acid sequence encoded by nucleotides 8515-9144 of SEQ ID NO: 224 (herein termed DUF1919);
(g): a nucleotide sequence encoding a polypeptide having UDP-galactopyranose mutase activity and having at least 95% identity with the amino acid sequence encoded by nucleotides 9159-10274 of SEQ ID NO: 224 (herein termed UDP-galactopyranose mutase);
(h): a nucleotide sequence encoding a polypeptide having dTDP-4-dehydrorhamnose_3,5-epimerase activity and having at least 95% identity with the amino acid sequence encoded by nucleotides 6586-7257 of SEQ ID NO: 224 (herein termed dTDP-4-dehydrorhamnose_3,5-epimerase);
(i): a nucleotide sequence encoding a polypeptide having dTDP-glucose 4,6-dehydratase activity and having at least 95% identity with the amino acid sequence encoded by nucleotides 4784-5695 of SEQ ID NO: 224 (herein termed dTDP-glucose 4,6-dehydratase); and
(j): a nucleotide sequence encoding a polypeptide having dTDP-4-dehydrorhamnose reductase activity and having at least 95% identity with the amino acid sequence encoded by nucleotides 5717-6631 of SEQ ID NO: 224 (herein termed dTDP-4-dehydrorhamnose reductase);
(vi) (a): a nucleotide sequence encoding a polypeptide having polymerase activity and having at least 95% identity with the amino acid sequence encoded by the nucleotide sequence of SEQ ID NO: 67 (herein termed wzy);
(b): a nucleotide sequence encoding a polypeptide having polysaccharide transporter activity and having at least 95% identity with the amino acid sequence encoded by the nucleotide sequence of SEQ ID NO: 73 (herein termed wzx);
(c): a nucleotide sequence encoding a polypeptide having glycosyltransferase (GT) activity comprising:
(c1): a nucleotide sequence having at least 95% identity with the amino acid sequence encoded by the nucleotide sequence of SEQ ID NO: 65 (herein termed GT1);
(c2): a nucleotide sequence having at least 95% identity with the amino acid sequence encoded by the nucleotide sequence of SEQ ID NO: 69 (herein termed GT2); and
(c3): a nucleotide sequence having at least 95% identity with the amino acid sequence encoded by the nucleotide sequence of SEQ ID NO: 71 (herein termed GT3);
(c4): a nucleotide sequence having at least 95% identity with the amino acid sequence encoded by the nucleotide sequence of SEQ ID NO: 85 (herein termed GT4);
(c5): a nucleotide sequence having at least 95% identity with the amino acid sequence encoded by the nucleotide sequence of SEQ ID NO: 87 (herein termed GT5); and
(c6): a nucleotide sequence having at least 95% identity with the amino acid sequence encoded by the nucleotide sequence of SEQ ID NO: 89 (herein termed GT6);
(d): a nucleotide sequence having epimerase/dehydratase activity and having at least 95% identity with the amino acid sequence encoded by the nucleotide sequence of SEQ ID NO: 93 (herein termed NAD-dependent epimerase/dehydratase 1);
(e): a nucleotide sequence having dehydrogenase activity and having at least 95% identity with the amino acid sequence encoded by the nucleotide sequence of SEQ ID NO: 79 (herein termed nucleotide sugar dehydrogenase);
(f): a nucleotide sequence having thymidylyltransferase activity and having at least 95% identity with the amino acid sequence encoded by the nucleotide sequence of SEQ ID NO: 95 (herein termed rfbA, glucose-1-phosphate thymidylyltransferase);
(g): a nucleotide sequence having dehydratase activity and having at least 95% identity with the amino acid sequence encoded by the nucleotide sequence of SEQ ID NO: 97 (herein termed dTDP-glucose 4,6-dehydratase);
(h): a nucleotide sequence having epimerase activity and having at least 95% identity with the amino acid sequence encoded by the nucleotide sequence of SEQ ID NO: 99 (herein termed dTDP-4-dehydrorhamnose 3,5-epimerase);
(i): a nucleotide sequence having epimerase/dehydratase activity and having at least 95% identity with the amino acid sequence encoded by the nucleotide sequence of SEQ ID NO: 101 (herein termed NAD-dependent epimerase/dehydratase family protein 2);
(j): a nucleotide sequence having acyltransferase activity and having at least 95% identity with the amino acid sequence encoded by the nucleotide sequence of SEQ ID NO: 111 (herein termed acyltransferase 1);
(k): a nucleotide sequence having acyltransferase activity and having at least 95% identity with the amino acid sequence encoded by the nucleotide sequence of SEQ ID NO: 107 (herein termed acyltransferase 2);
(l): a nucleotide sequence having reductase activity and having at least 95% identity with the amino acid sequence encoded by the nucleotide sequence of SEQ ID NO: 103 (herein termed dTDP-4-dehydrorhamnose reductase); and
(m): a nucleotide sequence having nucleotidyl transferase activity and having at least 95% identity with the amino acid sequence encoded by the nucleotide sequence of SEQ ID NO: 105 (herein termed nucleotidyl transferase).
(vii) (a): a nucleotide sequence encoding a polypeptide having polymerase activity and having at least 95% identity with the amino acid sequence encoded by nucleotides 5833-6927 of SEQ ID NO: 244 (herein termed wzy);
(c): at least one nucleotide sequence encoding a polypeptide having glycosyltransferase (GT) activity selected from:
(c1): a nucleotide sequence having at least 95% identity with the amino acid sequence encoded by nucleotides 4617-5123 of SEQ ID NO: 244 (herein termed GT1); and
(c2): a nucleotide sequence having at least 95% identity with the amino acid sequence encoded by nucleotides 5120-5827 of SEQ ID NO: 244 (herein termed GT2); and
(d): a nucleotide sequence encoding a polypeptide having UDP-N-acetylglucosamine-LPS N-acetylglucosamine transferase activity and having at least 95% identity with the amino acid sequence encoded by nucleotides 4168-4617 of SEQ ID NO: 244 (herein termed UDP-N-acetylglucosamine-LPS N-acetylglucosamine transferase);
(viii) (a): a nucleotide sequence encoding a polypeptide having polymerase activity and having at least 95% identity with the amino acid sequence encoded by the nucleotide sequence of SEQ ID NO: 123 (herein termed wzy);
(b): a nucleotide sequence encoding a polypeptide having polysaccharide transporter activity and having at least 95% identity with the amino acid sequence encoded by the nucleotide sequence of SEQ ID NO: 129 (herein termed wzx);
(c): a nucleotide sequence encoding a polypeptide having glycosyltransferase (GT) activity comprising:
(c1): a nucleotide sequence having at least 95% identity with the amino acid sequence encoded by the nucleotide sequence of SEQ ID NO: 121 (herein termed GT1);
(c2): a nucleotide sequence having at least 95% identity with the amino acid sequence encoded by the nucleotide sequence of SEQ ID NO: 125 (herein termed GT2);
(c3): a nucleotide sequence having at least 95% identity with the amino acid sequence encoded by the nucleotide sequence of SEQ ID NO: 127 (herein termed GT3);
(c4): a nucleotide sequence having at least 95% identity with the amino acid sequence encoded by the nucleotide sequence of SEQ ID NO: 143 (herein termed GT4);
(c5): a nucleotide sequence having at least 95% identity with the amino acid sequence encoded by the nucleotide sequence of SEQ ID NO: 145 (herein termed GT5); and
(c6): a nucleotide sequence having at least 95% identity with the amino acid sequence encoded by the nucleotide sequence of SEQ ID NO: 147 (herein termed GT6);
(d): a nucleotide sequence encoding a polypeptide having acetyltransferase activity and having at least 95% identity with the amino acid sequence encoded by the nucleotide sequence of SEQ ID NO: 149 (herein termed acetyltransferase);
(e): a nucleotide sequence encoding a polypeptide having dehydrogenase activity and having at least 95% identity with the amino acid sequence encoded by the nucleotide sequence of SEQ ID NO: 135 (herein termed nucleotide sugar dehydrogenase); and
(f): a nucleotide sequence encoding a polypeptide having acyltransferase activity and having at least 95% identity with the amino acid sequence encoded by the nucleotide sequence of SEQ ID NO: 151 (herein termed acyltransferase);
(ix) (a): a nucleotide sequence encoding a polypeptide having polymerase activity and having at least 95% identity with the amino acid sequence encoded by nucleotides 11201-12349 of the complementary strand of SEQ ID NO: 257 (herein termed wzy);
(b): a nucleotide sequence encoding a polypeptide having polysaccharide transporter activity and having at least 95% identity with the amino acid sequence encoded by nucleotides 15538-16953 of the complementary strand of SEQ ID NO: 257 (herein termed wzx);
(c): a nucleotide sequence encoding a polypeptide having glycosyltransferase (GT) activity comprising:
(c1): a nucleotide sequence having at least 95% identity with the amino acid sequence encoded by nucleotides 9726-10673 of the complementary strand of SEQ ID NO: 257 (herein termed GT1);
(c2): a nucleotide sequence having at least 95% identity with the amino acid sequence encoded by nucleotides 12336-13421 of the complementary strand of SEQ ID NO: 257 (herein termed GT2); and
(c3): a nucleotide sequence having at least 95% identity with the amino acid sequence encoded by nucleotides 13418-14260 of the complementary strand of SEQ ID NO: 257 (herein termed GT3);
(d): a nucleotide sequence encoding a polypeptide having nucleotide sugar dehydrogenase activity and having at least 95% identity with the amino acid sequence encoded by nucleotides 7727-8173 of the complementary strand of SEQ ID NO: 257 (herein termed nucleotide sugar dehydrogenase); and
(e): a nucleotide sequence encoding a polypeptide having acetyltransferase activity and having at least 95% identity with the amino acid sequence encoded by nucleotides 10657-11211 of the complementary strand of SEQ ID NO: 257 (herein termed acetyltransferase);
(x) (a): a nucleotide sequence encoding a polypeptide having polymerase activity and having at least 95% identity with the amino acid sequence encoded by nucleotides 10707-11846 of the complementary strand of SEQ ID NO: 274 (herein termed wzy);
(b): a nucleotide sequence encoding a polypeptide having polysaccharide transporter activity and having at least 95% identity with the amino acid sequence encoded by nucleotides 15037-16476 of the complementary strand of SEQ ID NO: 274 (herein termed wzx);
(c): a nucleotide sequence encoding a polypeptide having glycosyltransferase (GT) activity comprising:
(c1): a nucleotide sequence having at least 95% identity with the amino acid sequence encoded by nucleotides 9232-10179 of the complementary strand of SEQ ID NO: 274 (herein termed GT1);
(c2): a nucleotide sequence having at least 95% identity with the amino acid sequence encoded by nucleotides 11833-12918 of the complementary strand of SEQ ID NO: 274 (herein termed GT2); and
(c3): a nucleotide sequence having at least 95% identity with the amino acid sequence encoded by nucleotides 12915-13757 of the complementary strand of SEQ ID NO: 274 (herein termed GT3);
(d): a nucleotide sequence encoding a polypeptide having nucleotide sugar dehydrogenase activity and having at least 95% identity with the amino acid sequence encoded by nucleotides 7234-7680 of the complementary strand of SEQ ID NO: 274 (herein termed nucleotide sugar dehydrogenase); and
(e): a nucleotide sequence encoding a polypeptide having acetyltransferase activity and having at least 95% identity with the amino acid sequence encoded by nucleotides 10163-10717 of the complementary strand of SEQ ID NO: 274 (herein termed acetyltransferase).

3. The texturing lactic acid bacterium strain of clause (iv), clause (vii), clause (ix) or clause (x) of claim 1, wherein the texturing lactic acid bacterium strain generates fermented milks having a shear stress of 45 Pa or more when measured under the following conditions:
200 ml semi-fat milk (1.5% fat) is heated to 90° C. for 20 min, followed by cooling to an inoculation temperature of 30° C., and inoculated with 2 ml of an overnight culture of the lactic acid bacterium strain, and left at inoculation temperature until a pH of about 4.55 is reached, followed by storage at 4° C. until shear stress is measured at day 5, followed by gently stirring and measuring the shear stress at a shear rate of 300 s⁻¹.

4. The texturing lactic acid bacterium strain according to claim 3, wherein the strain is selected from the group consisting of strains deposited at Leibniz Institute DSMZ-German Collection of Microorganisms and Cell Cultures Inhoffenstr (DSMZ) under accession numbers DSM 33137, DSM 33140, DSM 33142 and DSM 33183, and strains derived from deposited strains DSM 33137, DSM 33140, DSM 33142 or DSM 33183, wherein the derived strains exhibit at least the same texturing capability as their respective mother strain selected from deposited strains DSM 33137, DSM 33140, DSM 33142 and DSM 33183, and generate fermented milks having a shear stress of 45 Pa or more when measured under the following conditions:
200 ml semi-fat milk (1.5% fat) is heated to 90° C. for 20 min, followed by cooling to an inoculation temperature of 30° C., and inoculated with 2 ml of an overnight culture of the lactic acid bacterium strain, and left at inoculation temperature until a pH of about 4.55 is reached, followed by storage at 4° C. until shear stress is measured at day 5, followed by gently stirring and measuring the shear stress at a shear rate of 300 s⁻¹.

5. The texturing lactic acid bacterium strain of claim 1, wherein the texturing lactic acid bacterium strain generates fermented milks having a shear stress of 40 Pa or more when measured at shear rate 300 s⁻¹ in the presence of a lactic acid bacterium strain selected from Lactococcus lactis subsp. cremoris strain deposited at DSMZ under accession number DSM 25485 and Lactococcus lactis subsp. lactis strain deposited at DSMZ under accession number DSM 33192, in a ratio of about 9:1 (texturing lactic acid bacterium strain: strain DSM 25485 and/or or DSM 33192), wherein the shear stress is measured under following conditions:
200 ml semi-fat milk (1.5% fat) is heated to 90° C. for 20 min, followed by cooling to an inoculation temperature of 30° C., and inoculated with 2 ml of an overnight culture of the lactic acid bacterium strains, and left at inoculation temperature until a pH of about 4.55 is reached, followed by storage at 4° C. until shear stress is measured at day 5, followed by gently stirring and measuring the shear stress at a shear rate of 300 s⁻¹.

6. The texturing lactic acid bacterium strain of clause (i), clause (ii), clause (iii), clause (v), clause (vi) or clause (viii) of claim 1, wherein the strain is selected from the strains deposited at DSMZ under accession numbers DSM 33134, DSM 33135, DSM 33136, DSM 33138, DSM 33139, and DSM 33141, and strains derived from deposited strains DSM 33139, DSM 33135, DSM 33136, DSM 33138, DSM 33139, or DSM 33141, wherein the derived strains exhibit at least the same texturing capability as their respective mother strain selected from deposited strains DSM 33134, DSM 33135, DSM 33136, DSM 33138, DSM 33139, and DSM 33141, and generate fermented milks having a shear stress of 40 Pa or more when measured at shear rate 300 s⁻¹ in the presence of a lactic acid bacterium strain selected from Lactococcus lactis subsp. cremoris strain deposited at DSMZ under accession number DSM 25485, and Lactococcus lactis subsp. lactis strain deposited at DSMZ under accession number DSM 33192, in a ratio of about 9:1 (texturing lactic acid bacterium strain: strain DSM 25485 or DSM 33192), wherein the shear stress is measured under following conditions:
200 ml semi-fat milk (1.5% fat) is heated to 90° C. for 20 min, followed by cooling to an inoculation temperature of 30° C., and inoculated with 2 ml of an overnight culture of the lactic acid bacterium strains, and left at inoculation temperature until a pH of about 4.55 is reached, followed by storage at 4° C. until shear stress is measured at day 5, followed by gently stirring and measuring the shear stress at a shear rate of 300 s⁻¹.

7. The texturing lactic acid bacterium strain of claim 1, wherein the texturing lactic acid bacterium strain generates fermented milks having a shear stress of more than 24 Pa when measured under the following conditions:
200 ml of soy milk supplemented with 2% glucose is inoculated with 2 ml of an overnight culture of the lactic acid bacterium strain, and left at an inoculation temperature of 30° C. until a pH of about 4.56 is reached, followed by storage at 4° C. until shear stress is measured at day 5, followed by gently stirring and measuring the shear stress at a shear rate of 300 s⁻¹.

8. The texturing lactic acid bacterium strain of claim 7, wherein the texturing lactic acid bacterium strain is selected from the strains deposited at DSMZ under accession numbers DSM 33138, DSM 33140, DSM 33136, DSM 33135, DSM 33141, DSM 33137, DSM 33134, DSM 33139, DSM 33142, DSM 33192, DSM 25485, and DSM 33183, and strains derived from strains DSM 33138, DSM 33140, DSM 33136, DSM 33135, DSM 33141, DSM 33137, DSM 33134, DSM 33139, DSM 33142, DSM 33192, DSM 25485, or DSM 33183, wherein the derived strains exhibit at least the same texturing capability as their respective mother strain selected from deposited strains DSM 33138, DSM 33140, DSM 33136, DSM 33135, DSM 33141, DSM 33137, DSM 33134, DSM 33139, DSM 33142, DSM 33192, DSM 25485, and DSM 33183, and generate fermented milks having a shear stress of more than 24 Pa, when measured under the following conditions:
200 ml of soy milk supplemented with 2% is inoculated with 2 ml of an overnight culture of the lactic acid bacterium strain, and left at an inoculation temperature of 30° C. until a pH of about 4.56 is reached, followed by storage at 4° C. until shear stress is measured at day 5, followed by gently stirring and measuring the shear stress at a shear rate of 300 s⁻¹.

9. A composition comprising the Lactococcus lactis lactic acid bacterium strain of claim 1 and one or more further lactic acid bacterium strain(s), wherein the one or more further lactic acid bacterium strain(s) is(are) able to:
i) generate fermented milks with a pH of about 4.55 in 15 hours or less under the following conditions:
200 ml semi-fat milk (1.5% fat) is heated to 90° C. for 20 min, followed by cooling to an inoculation temperature of 30° C., and inoculated with 2 ml of an overnight culture of the lactic acid bacterium strain, and left at inoculation temperature until a pH of about 4.55 is reached; and
ii) generate fermented milks having a shear stress of 40 Pa or more measured under the following conditions:
200 ml semi-fat milk (1.5% fat) is heated to 90° C. for 20 min, followed by cooling to an inoculation temperature of 30° C., and inoculated with 2 ml of an overnight culture of the lactic acid bacterium strain, and left at inoculation temperature until a pH of about 4.55 is reached, followed by storage at 4° C. until shear stress is measured at day 5, followed by gently stirring and measuring the shear stress at a shear rate of 300 s⁻¹.

10. The composition according to claim 9, wherein the one or more further lactic acid bacterium strain(s) comprises an active eps gene cluster capable of producing exopolysaccharide (EPS), wherein the eps gene cluster comprises:
(xi) (a): a nucleotide sequence encoding a polypeptide having polymerase activity and having at least 95% identity with the amino acid sequence encoded by nucleotides 6955-8145 of SEQ ID NO:183 (herein termed wzy);
(b): a nucleotide sequence encoding a polypeptide having polysaccharide transporter activity and having at least 95% identity with the amino acid sequence encoded by nucleotides 9309-10727 of SEQ ID NO:183 (herein termed wzx); and
(c): a nucleotide sequence encoding a polypeptide having glycosyltransferase (GT) activity comprising:
(c1): a nucleotide sequence having at least 95% identity with the amino acid sequence encoded by nucleotides 4008-4478 of SEQ ID NO:183 (herein termed GT1);
(c2): a nucleotide sequence having at least 95% identity with the amino acid sequence encoded by nucleotides 4478-4960 of SEQ ID NO:183 (herein termed GT2);
(c3): a nucleotide sequence having at least 95% identity with the amino acid sequence encoded by nucleotides 5015-5965 of SEQ ID NO:183 (herein termed GT3); and
(c4): a nucleotide sequence having at least 95% identity with the amino acid sequence encoded by nucleotides 6026-6955 of SEQ ID NO:183 (herein termed GT4).

11. The composition according to claim 9, further comprising one or more lactic acid bacterium strains selected from:
(i) Lactococcus lactis sub sp. cremoris strain DSM 25485, or a mutant or variant thereof;
(ii) Lactococcus lactis subsp. lactis strain DSM 33192, or a mutant or variant thereof; and
(iii) Lactococcus lactis strain DSM 33133, or a mutant or variant thereof.

12. (canceled)

13. A method of producing a food product comprising fermenting a milk substrate with at least one lactic acid bacterium strain according to claim 1.

14. The method according to claim 13, wherein the method comprises fermenting the milk substrate with a composition according to claim 9.

15. A food product comprising at least one lactic acid bacterium strain according to claim 1.

16. (canceled)

17. The method according to claim 21, wherein the fermented milk product has a shear stress of 50 Pa or more when measured under following conditions:
200 ml semi-fat milk (1.5% fat) is heated to 90° C. for 20 min, followed by cooling to an inoculation temperature of 30° C., and inoculated with 2 ml of an overnight culture of the lactic acid bacterium strain, and left at inoculation temperature until a pH of about 4.55 is reached, followed by storage at 4° C. until shear stress is measured at day 5, followed by gently stirring and measuring the shear stress at a shear rate of 300 s⁻¹.

18. The method according to claim 21, further comprising fermenting the milk substrate with at least one Lactococcus lactis lactic acid bacterium strain comprising an active eps gene cluster capable of producing exopolysaccharide (EPS), wherein the eps gene cluster comprises nucleotide sequences selected from (i) to (x):
(i) (a): a nucleotide sequence encoding a polypeptide having polymerase activity and having at least 95% identity with the amino acid sequence encoded by the nucleotide sequence of SEQ ID NO: 11 (herein termed wzy);
(b): a nucleotide sequence encoding a polypeptide having polysaccharide transporter activity and having at least 95% identity with the amino acid sequence encoded by the nucleotide sequence of SEQ ID NO: 17 (herein termed wzx); and
(c): a nucleotide sequence encoding a polypeptide having glycosyltransferase (GT) activity comprising:
(c1): a nucleotide sequence having at least 95% identity with the amino acid sequence encoded by the nucleotide sequence of SEQ ID NO: 9 (herein termed GT1),
(c2): a nucleotide sequence having at least 95% identity with the amino acid sequence encoded by the nucleotide sequence of SEQ ID NO: 13 (herein termed GT2), and
(c3): a nucleotide sequence having at least 95% identity with the amino acid sequence encoded by the nucleotide sequence of SEQ ID NO: 15 (herein termed GT3);
(ii) (a): a nucleotide sequence encoding a polypeptide having polymerase activity and having at least 95% identity with the amino acid sequence encoded by nucleotides 13939-15042 of SEQ ID NO:199 (herein termed wzy);
(b): a nucleotide sequence encoding a polypeptide having polysaccharide transporter activity and having at least 95% identity with the amino acid sequence encoded by nucleotides 26029-27444 of the complementary strand of SEQ ID NO:199 (herein termed wzx); and
(c): a nucleotide sequence encoding a polypeptide having glycosyltransferase (GT) activity comprising:
(c1): a nucleotide sequence having at least 95% identity with the amino acid sequence encoded by nucleotides 4174-4824 of SEQ ID NO:199 (herein termed GT1);
(c2): a nucleotide sequence having at least 95% identity with the amino acid sequence encoded by nucleotides 7276-8508 of SEQ ID NO:199(herein termed GT2);
(c3): a nucleotide sequence having at least 95% identity with the amino acid sequence encoded by nucleotides 11042-12391 of SEQ ID NO:199 (herein termed GT3);
(c4): a nucleotide sequence having at least 95% identity with the amino acid sequence encoded by nucleotides 13008-13934 of SEQ ID NO:199 (herein termed GT4); and
(c5): a nucleotide sequence having at least 95% identity with the amino acid sequence encoded by nucleotides 18528-19508 of SEQ ID NO:199 (herein termed GT5);
(iii) (a): a nucleotide sequence encoding a polypeptide having polymerase activity and having at least 95% identity with the amino acid sequence encoded by the nucleotide sequence of SEQ ID NO: 39 (herein termed wzy);
(b): a nucleotide sequence encoding a polypeptide having polysaccharide transporter activity and having at least 95% identity with the amino acid sequence encoded by the nucleotide sequence of SEQ ID NO: 45 (herein termed wzx);
(c): a nucleotide sequence encoding a polypeptide having glycosyltransferase (GT) activity comprising:
(c1): a nucleotide sequence having at least 95% identity with the amino acid sequence encoded by the nucleotide sequence of SEQ ID NO: 37 (herein termed GT1);
(c2): a nucleotide sequence having at least 95% identity with the amino acid sequence encoded by the nucleotide sequence of SEQ ID NO: 41 (herein termed GT2); and
(c3): a nucleotide sequence having at least 95% identity with the amino acid sequence encoded by the nucleotide sequence of SEQ ID NO: 43 (herein termed GT3);
(iv) (a): a nucleotide sequence encoding a polypeptide having polymerase activity and having at least 95% identity with the amino acid sequence encoded by the nucleotide sequence of SEQ ID NO: 163 (herein termed wzy);
(b): a nucleotide sequence encoding a polypeptide having polysaccharide transporter activity and having at least 95% identity with the amino acid sequence encoded by the nucleotide sequence of SEQ ID NO: 169 (herein termed wzx); and
(c): a nucleotide sequence encoding a polypeptide having glycosyltransferase (GT) activity comprising:
(c1): a nucleotide sequence having at least 95% identity with the amino acid sequence encoded by the nucleotide sequence of SEQ ID NO: 161 (herein termed GT1);
(c2): a nucleotide sequence having at least 95% identity with the amino acid sequence encoded by the nucleotide sequence of SEQ ID NO: 165 (herein termed GT2);
(c3): a nucleotide sequence having at least 95% identity with the amino acid sequence encoded by the nucleotide sequence of SEQ ID NO: 167 (herein termed GT3); and
(c4) a nucleotide sequence having at least 95% identity with the amino acid sequence encoded by the nucleotide sequence of SEQ ID NO: 181 (herein termed GT4);
(v) (a): a nucleotide sequence encoding a polypeptide having polymerase activity and having at least 95% identity with the amino acid sequence encoded by nucleotides 13939-15042 of SEQ ID NO: 224 (herein termed wzy);
and
(c): a nucleotide sequence encoding a polypeptide having glycosyltransferase (GT) activity comprising:
(c1): a nucleotide sequence having at least 95% identity with the amino acid sequence encoded by nucleotides 4174-4824 of SEQ ID NO: 224 (herein termed GT1);
(c2): a nucleotide sequence having at least 95% identity with the amino acid sequence encoded by nucleotides 11042-12391 of SEQ ID NO: 224 (herein termed GT2);
(c3): a nucleotide sequence having at least 95% identity with the amino acid sequence encoded by nucleotides 13008-13934 of SEQ ID NO: 224 (herein termed GT3); and
(c4): a nucleotide sequence having at least 95% identity with the amino acid sequence encoded by nucleotides 18527-19507 of SEQ ID NO: 224 (herein termed GT4);
(vi) (a): a nucleotide sequence encoding a polypeptide having polymerase activity and having at least 95% identity with the amino acid sequence encoded by the nucleotide sequence of SEQ ID NO: 67 (herein termed wzy);
(b): a nucleotide sequence encoding a polypeptide having polysaccharide transporter activity and having at least 95% identity with the amino acid sequence encoded by the nucleotide sequence of SEQ ID NO: 73 (herein termed wzx);
(c): a nucleotide sequence encoding a polypeptide having glycosyltransferase (GT) activity comprising:
(c1): a nucleotide sequence having at least 95% identity with the amino acid sequence encoded by the nucleotide sequence of SEQ ID NO: 65 (herein termed GT1);
(c2): a nucleotide sequence having at least 95% identity with the amino acid sequence encoded by the nucleotide sequence of SEQ ID NO: 69 (herein termed GT2); and
(c3): a nucleotide sequence having at least 95% identity with the amino acid sequence encoded by the nucleotide sequence of SEQ ID NO: 71 (herein termed GT3);
(c4): a nucleotide sequence having at least 95% identity with the amino acid sequence encoded by the nucleotide sequence of SEQ ID NO: 85 (herein termed GT4);
(c5): a nucleotide sequence having at least 95% identity with the amino acid sequence encoded by the nucleotide sequence of SEQ ID NO: 87 (herein termed GT5); and
(c6): a nucleotide sequence having at least 95% identity with the amino acid sequence encoded by the nucleotide sequence of SEQ ID NO: 89 (herein termed GT6);
(vii) (a): a nucleotide sequence encoding a polypeptide having polymerase activity and having at least 95% identity with the amino acid sequence encoded by nucleotides 5833-6927 of SEQ ID NO: 244 (herein termed wzy);
and
(c): a nucleotide sequence encoding a polypeptide having glycosyltransferase (GT) activity comprising:
(c1): a nucleotide sequence having at least 95% identity with the amino acid sequence encoded by nucleotides 4617-5123 of SEQ ID NO: 244 (herein termed GT1); and
(c2): a nucleotide sequence having at least 95% identity with the amino acid sequence encoded by nucleotides 5120-5827 of SEQ ID NO: 244 (herein termed GT2);
(viii) (a): a nucleotide sequence encoding a polypeptide having polymerase activity and having at least 95% identity with the amino acid sequence encoded by the nucleotide sequence of SEQ ID NO: 123 (herein termed wzy);
(b): a nucleotide sequence encoding a polypeptide having polysaccharide transporter activity and having at least 95% identity with the amino acid sequence encoded by the nucleotide sequence of SEQ ID NO: 129 (herein termed wzx);
(c): a nucleotide sequence encoding a polypeptide having glycosyltransferase (GT) activity comprising:
(c1): a nucleotide sequence having at least 95% identity with the amino acid sequence encoded by the nucleotide sequence of SEQ ID NO: 121 (herein termed GT1);
(c2): a nucleotide sequence having at least 95% identity with the amino acid sequence encoded by the nucleotide sequence of SEQ ID NO: 125 (herein termed GT2); and
(c3): a nucleotide sequence having at least 95% identity with the amino acid sequence encoded by the nucleotide sequence of SEQ ID NO: 127 (herein termed GT3);
(c4): a nucleotide sequence having at least 95% identity with the amino acid sequence encoded by the nucleotide sequence of SEQ ID NO: 143 (herein termed GT4);
(c5): a nucleotide sequence having at least 95% identity with the amino acid sequence encoded by the nucleotide sequence of SEQ ID NO: 145 (herein termed GT5); and
(c6): a nucleotide sequence having at least 95% identity with the amino acid sequence encoded by the nucleotide sequence of SEQ ID NO: 147 (herein termed GT6);
(ix) (a): a nucleotide sequence encoding a polypeptide having polymerase activity and having at least 95% identity with the amino acid sequence encoded by nucleotides 11201-12349 of the complementary strand of SEQ ID NO: 257 (herein termed wzy);
(b): a nucleotide sequence encoding a polypeptide having polysaccharide transporter activity and having at least 95% identity with the amino acid sequence encoded by nucleotides 15538-16953 of the complementary strand of SEQ ID NO: 257 (herein termed wzx); and
(c): a nucleotide sequence encoding a polypeptide having glycosyltransferase (GT) activity comprising:
(c1): a nucleotide sequence having at least 95% identity with the amino acid sequence encoded by nucleotides 9726-10673 of the complementary strand of SEQ ID NO: 257 (herein termed GT1);
(c2): a nucleotide sequence having at least 95% identity with the amino acid sequence encoded by nucleotides 12336-13421 of the complementary strand of SEQ ID NO: 257 (herein termed GT2); and
(c3): a nucleotide sequence having at least 95% identity with the amino acid sequence encoded by nucleotides 13418-14260 of the complementary strand of SEQ ID NO: 257 (herein termed GT3);
(x) (a): a nucleotide sequence encoding a polypeptide having polymerase activity and having at least 95% identity with the amino acid sequence encoded by nucleotides 10707-11846 of the complementary strand of SEQ ID NO: 274 (herein termed wzy);
(b): a nucleotide sequence encoding a polypeptide having polysaccharide transporter activity and having at least 95% identity with the amino acid sequence encoded by nucleotides 15037-16476 of the complementary strand of SEQ ID NO: 274 (herein termed wzx); and
(c): a nucleotide sequence encoding a polypeptide having glycosyltransferase (GT) activity comprising:
(c1): a nucleotide sequence having at least 95% identity with the amino acid sequence encoded by nucleotides 9232-10179 of the complementary strand of SEQ ID NO: 274 (herein termed GT1);
(c2): a nucleotide sequence having at least 95% identity with the amino acid sequence encoded by nucleotides 11833-12918 of the complementary strand of SEQ ID NO: 274 (herein termed GT2); and
(c3): a nucleotide sequence having at least 95% identity with the amino acid sequence encoded by nucleotides 12915-13757 of the complementary strand of SEQ ID NO: 274 (herein termed GT3).

19. A strain of Lactococcus lactis subsp. lactis deposited at DSMZ under accession number DSM 33192.

20. The composition according to claim 9, wherein the one or more further lactic acid bacterium strain(s) comprises a Lactococcus lactis strain comprising an active eps gene cluster capable of producing exopolysaccharide (EPS), wherein the eps gene cluster comprises SEQ ID NO.: 290.

21. A method of increasing viscosity of a fermented milk product, comprising fermenting a milk substrate with one or more strains selected from Lactococcus lactis subsp. cremoris strain DSM 25485 and Lactococcus lactis subsp. lactis strain DSM 33192.

22. A food product comprising a composition according to claim 9.

The application's sequence listing, which the Patent Office published only in electronic form, follows.

SEQUENCE LISTING (294 sequences)

SEQ ID NO: 1 - DNA, 318 bp, Lactococcus lactis subsp. lactis
  ORF of the epsR gene of DSM 33134
atggatgatttattttaccatcgtctaaaggaactagttgaatcaagtggtaaatctgcaaatcaaatagaaagggaattgggttaccctagaaattctttgaataattataagttgggaggagaaccctctgggacaagattaataggactatcagagtattttaatgtgtctccaaaatatctgatgggtataattgatgagcctaatgacagttctgcaattaatctttttaaaactctaactcaagaagagaaaaaagaaatgtttataatttgtcaaaaatggctttttttagaatatcaaatagagttataa

SEQ ID NO: 2 - protein, 105 aa, Lactococcus lactis subsp. lactis
  33134_epsR
MDDLFYHRLKELVESSGKSANQIERELGYPRNSLNNYKLGGEPSGTRLIGLSEYFNVSPKYLMGIIDEPNDSSAINLFKTLTQEEKKEMFIICQKWLFLEYQIEL

SEQ ID NO: 3 - DNA, 768 bp, Lactococcus lactis subsp. lactis
  ORF of the epsX gene of DSM 33134
atgatgaaaaaaggaatttttgtaattactatagtgatatctatagcatttataattggaggtttttatagttataattctaggataaataatctttcaaaagctgataaaggaaaagaagttgtaaaaaatagcagtgaaaaaaatcagatagaccttacctataaaaagtattataaaaatttaccaaaatcagttcaaaataaaatagatgatatttcatccaaaaataaagaagttactttaacttgtatttggcaatctgattcagttatttctgaacaatttcaacaaaacttacaaaaatattatggaaataagttttggaacatcaaaaatatcacttacaatggcgaaactagtgaacaattattggctgaaaaagttgaaaaccaagtattagccactaatcctgatgttgttttatatgaagctccactttttaatgataaccaaaacattgaagcaacagcctcactgactagtaatgagcaacttataacaaatttggctagtgcaggagcggaggtaatagttcaaccctctccaccgatctatggtggtgttgtgtaccccgtacaagaagaacaatttaaacaatctttatctacaaagtatccctatatagactactgggctagttacccagacaaaaattctgatgaaatgaaggggctgttttctgatgatggagtatatagaacattaaatgcttcggggaataaggtttggctagattatattactaaatattttacagcaaactaa

SEQ ID NO: 4 - protein, 255 aa, Lactococcus lactis subsp. lactis
  33134_epsX
MMKKGIFVITIVISIAFIIGGFYSYNSRINNLSKADKGKEVVKNSSEKNQIDLTYKKYYKNLPKSVQNKIDDISSKNKEVTLTCIWQSDSVISEQFQQNLQKYYGNKFWNIKNITYNGETSEQLLAEKVENQVLATNPDVVLYEAPLFNDNQNIEATASLTSNEQLITNLASAGAEVIVQPSPPIYGGVVYPVQEEQFKQSLSTKYPYIDYWASYPDKNSDEMKGLFSDDGVYRTLNASGNKVWLDYITKYFTAN

SEQ ID NO: 5 - DNA, 765 bp, Lactococcus lactis subsp. lactis
  ORF of the epsB gene of DSM 33134
atgattgatattcattgccatattttaccggggatagatgatggagctaaaacttctggagatactctgacaatgctgaaatcagcaattgatgaagggataacaaccatcactgccactcctcatcataatcctcaatttaataatgaatcaccgcttattttgaagaaagttaaggaagttcaaaatatcattgacgagcatcaattaccaattgaagttttacccggacaagaggtgagaatatatggtgatttattaaaagaattttctgaaggaaagttactgacagcagcgggcacttcaagttatatattgattgaatttccatcaaatcatgtgccagcttatgctaaagaacttttttataatattcaattggagggacttcaacctattttggtccaccctgagcgtaatagtggaatcattgagaaccctgatatattatttgattttattgaacaaggagtactaagtcagataacagcttcaagtgtcactggtcattttggtaaaaaaatacaaaagctgtcatttaaaatgatagaaaaccatctgacgcattttgttgcatcagatgcgcataatgtgacgtcacgtgcatttaagatgagggaagcatttgaaatgattgaagatagttatggttctggtgtatcacgaatgtttcaaaataatgcagagtcagtgattttaaacgaaagtttttatcaagaaaaaccaacaaagatcaaaacaaagaaatttttaggattattttaa

SEQ ID NO: 6 - protein, 254 aa, Lactococcus lactis subsp. lactis
  33134_epsB
MIDIHCHILPGIDDGAKTSGDTLTMLKSAIDEGITTITATPHHNPQFNNESPLILKKVKEVQNIIDEHQLPIEVLPGQEVRIYGDLLKEFSEGKLLTAAGTSSYILIEFPSNHVPAYAKELFYNIQLEGLQPILVHPERNSGIIENPDILFDFIEQGVLSQITASSVTGHFGKKIQKLSFKMIENHLTHFVASDAHNVTSRAFKMREAFEMIEDSYGSGVSRMFQNNAESVILNESFYQEKPTKIKTKKFLGLF

SEQ ID NO: 7 - DNA, 696 bp, Lactococcus lactis subsp. lactis
  ORF of the epsD gene of DSM 33134
atggctaaaaataaaagaagcatagacaataatcgttatattattaccagtgtcaatcctcaatcacctatttccgaacaatatcgtacgattcgtacgaccattgattttaaaatggcggatcaagggattaaaagttttctagtaacatcttcagaagcagctgaaggtaaatcaaacgagagtgctaatctagctgttgcttttgcacaacaaggtaaaaaagtacttttaattgatggcgatcttcgtaaaccgactgttaacattacttttaaagtacaaaatagagtaggattaaccaatattttaatgcatcaatcttcgattgaagatgccatacaagggacaagactttctgaaaatcttacaataattacctctggtccaattccacctaatccatcggaattattagcatctagtgcaatgaagaagttgattgactctgtgtccgattcctttgatgttgttttgattgatactccacctctctatgcagttactgatgctcaaattttgagtgtttatgtaggaggagtggttcttgttgtacgtgcctatgaaacaaaaaaagagagtttagcaaaaacaaaaaaaatactggaacaagttaatgcaaatatattaggagttgttttgcatggggtagactcttctgagtcaccgtcgtattactactacggagtagagtaa

SEQ ID NO: 8 - protein, 231 aa, Lactococcus lactis subsp. lactis
  33134_epsD
MAKNKRSIDNNRYIITSVNPQSPISEQYRTIRTTIDFKMADQGIKSFLVTSSEAAEGKSNESANLAVAFAQQGKKVLLIDGDLRKPTVNITFKVQNRVGLTNILMHQSSIEDAIQGTRLSENLTIITSGPIPPNPSELLASSAMKKLIDSVSDSFDVVLIDTPPLYAVTDAQILSVYVGGVVLVVRAYETKKESLAKTKKILEQVNANILGVVLHGVDSSESPSYYYYGVE

SEQ ID NO: 9 - DNA, 780 bp, Lactococcus lactis subsp. lactis
  ORF coding a putative GT1 protein of DSM 33134
gtgaagtttatgaaaaaagaaaaaatttcaattattacacctgtatataattgtgaaaaacttattgaaaaaaccattgaatgtgttttgaatcaaacatataaaaattgggagtggctacttgttgatgattgttcaccagacaactctgccataataataaaaaagtatgctaaaaatgataatagaattaaatattttaaattaagtgaaaatagtggtgctgccgtttctagaaataaagcattggcagaatctactggtagatttgtagcttatttggatgcggatgatttatggaaaaatgataaattggagaaacaagtaaaatttatgttagaaaatcaatattcatttacttgtacggactatgaaaaaattacggaaacaggtaatagtttaaataaaattattaaaataccaaaaaaagtagattataatttctttttaagaaatacaataattcaaactgttggagtgatggtagatacaaaattaacagggaaagaattattgaagatgcctaatattagacgaagacaagatgctgcaacatggtgtcaacttttaaaaaatggacacgattgttatgagtgtccagagaatttgtcttattatagagtagtaacaaattctttatcaagtaataaatttaaagcaataaaaatgaattggtactggtatagaaagatagaaaaattacctttatggaaagcatgttattgctttattggatatgcttttaatggtgtaagaaaaagaatatatataaaaaggtaa

SEQ ID NO: 10 - protein, 259 aa, Lactococcus lactis subsp. lactis
  33134_GT1
VKFMKKEKISIITPVYNCEKLIEKTIECVLNQTYKNWEWLLVDDCSPDNSAIIIKKYAKNDNRIKYFKLSENSGAAVSRNKALAESTGRFVAYLDADDLWKNDKLEKQVKFMLENQYSFTCTDYEKITETGNSLNKIIKIPKKVDYNFFLRNTIIQTVGVMVDTKLTGKELLKMPNIRRRQDAATWCQLLKNGHDCYECPENLSYYRVVTNSLSSNKFKAIKMNWYWYRKIEKLPLWKACYCFIGYAFNGVRKRIYIKR

SEQ ID NO: 11 - DNA, 1287 bp, Lactococcus lactis subsp. lactis
  ORF of a putative wzy gene of DSM 33134
ttgaaaggaattaataaaatgataaaaagaaatcaattaaatttatttttgcagtatatacttgcttttctaattattttagaaactagaagtgtatattctcgttgtgttgttggtcatatagatgaaataataataggtggtataatattaacaataattttaattattttagttaacatgaattataaattaaaaactaaatcattgttttttttacttttttattatctatatatgtttatatttttaattataaatgttgatggatataatgtaaactttgttataatatttatgattttatttccacttgtatttttaatgctcaatttatatgatagtaaagaaataaaaaatctgtttaaagcatatgtaaatattatggttatcatttctgcaatatccttatttttttacatattcggatccttaactggtatggtttctactaatattatacaagaaataaattggggtggagattatggaggtaataaaataataaatggatattttggattgcattttaatacacaaacaactgtaatatttggtgatgccattttaagaaatacaagtatatttgttgaaggaccgatgtttgcattacatctcttatttgcaatggcattatcactatttatgaataaaaaattaataaataaatattcaataatatttggcttttcaatattatcatcgctatctataactgctatattattttatatgtttttattgttttacaagtatacattttataataaaagcaaaacgaagattattttgttgccaatattgtttttcatatttttaatcataggaactactttttttaatgataagcaatcaacaaattcctataatataagaaatgacgattatacagcaagttttagagtatttaatgattatccaatttttggaagtggatttgctaataataacatagtaattaaatatatgtcaacatttagattgtataatacaggtttagctaactcatttgtagtcttattagtccaaggaggattatatttagtaattttttatttactgccagttattttgaacagtttaaatttaattaaatccaaaaataaaaatttgtttttgatagaaattatgcttttacaactttatttattttttatgaatgcttatcaatatacatcattgatgataatctttctagcatttgattattatattttattattttataacaaaaataatgatttaaaaaatttgcaacttaaggaggaaacatatgaaaaaatatga

SEQ ID NO: 12 - protein, 428 aa, Lactococcus lactis subsp. lactis
  33134_wzy
LKGINKMIKRNQLNLFLQYILAFLIILETRSVYSRCVVGHIDEIIIGGIILTIILIILVNMNYKLKTKSLFFLLFYYLYMFIFLIINVDGYNVNFVIIFMILFPLVFLMLNLYDSKEIKNLFKAYVNIMVIISAISLFFYIFGSLTGMVSTNIIQEINWGGDYGGNKIINGYFGLHFNTQTTVIFGDAILRNTSIFVEGPMFALHLLFAMALSLFMNKKLINKYSIIFGFSILSSLSITAILFYMFLLFYKYTFYNKSKTKIILLPILFFIFLIIGTTFFNDKQSTNSYNIRNDDYTASFRVFNDYPIFGSGFANNNIVIKYMSTFRLYNTGLANSFVVLLVQGGLYLVIFYLLPVILNSLNLIKSKNKNLFLIEIMLLQLYLFFMNAYQYTSLMIIFLAFDYYILLFYNKNNDLKNLQLKEETYEKI

SEQ ID NO: 13 - DNA, 1053 bp, Lactococcus lactis subsp. lactis
  ORF coding a putative GT2 protein of DSM 33134
gtgcaaaggaatgataaaagaatgaaaaaaattttatatatagctacaactgccgatagtagaaatagattagatggtgaaacaattaaatgtagattattaagagaatatctaagaggaatagaaaatgttgaacttatttctgtagatactgataattggaaaaagcataaattaaaattagtatttttaataatatataattttattttttgtaattctatcgttgtttcatctgcggataaaggtgctaatattgtcttagatttttttagaaaaattaatactaaaaaaaatatttattattttgtaattggtggtacattatataaaaatataaaagaaaaaaattggaatattgaaacatataaaagattaaaacatatttacgttgaggcaaatcaactgaaattagatttgaactctttaaatattactaatgttgatatcttaaataattttagaaaagtaaataaatttgaaaataaatataaaaagagtaaagaaataaaatttgtttactttggaagagttataagagaaaaaggtgtagaggaagcaataaaaatgattaacaggcttaatgctgaaaatattatatgtacatttgatatatatgggcaatgtaaagatgaatatttgcaacaaatacaagaaaagtttaatgaaaacataagatttcatggtgaaataaaaccaaatggtaaaaaagaatatgaaatattatcacaatatgatgtttttctgttcccaactgagtacccaggagaatgccttccaggagctttgattgattgctatatttctggacttgcagtaattgcttcaaattggaaatatgcaaaggaatatattttagataatgaaaatggaaaaatctttgaatacaaagactataatgatatgtataaaaaaacaaaagaaatggtagctgaaaatgttattcaaaaatataaattaaaatcagtagaattatcaaaaaaatataatatggatgtattattaaatgactttaaaaaagaaataatggaggaaaaaaatgaaactttttaa

SEQ ID NO: 14 - protein, 350 aa, Lactococcus lactis subsp. lactis
  33134_GT2
VQRNDKRMKKILYIATTADSRNRLDGETIKCRLLREYLRGIENVELISVDTDNWKKHKLKLVFLIIYNFIFCNSIVVSSADKGANIVLDFFRKINTKKNIYYFVIGGTLYKNIKEKNWNIETYKRLKHIYVEANQLKLDLNSLNITNVDILNNFRKVNKFENKYKKSKEIKFVYFGRVIREKGVEEAIKMINRLNAENIICTFDIYGQCKDEYLQQIQEKFNENIRFHGEIKPNGKKEYEILSQYDVFLFPTEYPGECLPGALIDCYISGLAVIASNWKYAKEYILDNENGKIFEYKDYNDMYKKTKEMVAENVIQKYKLKSVELSKKYNMDVLLNDFKKEIMEEKNETF

SEQ ID NO: 15 - DNA, 918 bp, Lactococcus lactis subsp. lactis
  ORF coding a putative GT3 protein of DSM 33134
ttgaaaaatataggaatagttctcgtaacatataatagattggagaaattaaaaattgcattatcatgttacgaaaaacaaaaaacaaaaattgatactatgataattgttaataattgcagtacagatgggacatttgaatttttagaagaatatagtaaaaggaagttaaaatataaaattgtaattttaaatatgccaaaaaatcttggtggtgcaggaggtttctttgaaggaatgaaatgtgcaatgaaagaagatttagagtgggtttatatttcagatgatgatgcttatccaaatgacaatactatatatgagcttgaaaaaatttactcaaaattacaaaataaagatgaaattgttgcattgtgcagtgttgttgaaaataaaaatggtttagattatgggcatagattaagaataatgaaaaatctcttttttgtgaagtggaaaccagtagataggagtgaatataataaagattattttaatgttgacattctatcgtatgtaggatcacttattaatgttaatgcattatattgtgcaggtttagacagaaaagatttctttatatatcatgatgatcaagaacattcattgagattaggcaaaaatggaaaaatattaacttgcactaaaagtgtaatacatcatgataccgaagtaaaaaaatacaaggaattattttggggaaattactatgatactcgaaataggcttttaatgataaaatataattttcctttaagatatttctatataagatactatttaggatatataagggattgtttattatgcaaaaacaaaataaaaaaagaaatgttaaaagttgcatatatggatgctaaaaataataaattagggttgaattcaatatataaacctggttgggtagctaaaaataaataa

SEQ ID NO: 16 - protein, 305 aa, Lactococcus lactis subsp. lactis
  33134_GT3
LKNIGIVLVTYNRLEKLKIALSCYEKQKTKIDTMIIVNNCSTDGTFEFLEEYSKRKLKYKIVILNMPKNLGGAGGFFEGMKCAMKEDLEWVYISDDDAYPNDNTIYELEKIYSKLQNKDEIVALCSVVENKNGLDYGHRLRIMKNLFFVKWKPVDRSEYNKDYFNVDILSYVGSLINVNALYCAGLDRKDFFIYHDDQEHSLRLGKNGKILTCTKSVIHHDTEVKKYKELFWGNYYDTRNRLLMIKYNFPLRYFYIRYYLGYIRDCLLCKNKIKKEMLKVAYMDAKNNKLGLNSIYKPGWVAKNK

SEQ ID NO: 17 - DNA, 1263 bp, Lactococcus lactis subsp. lactis
  ORF of a putative wzx gene of DSM 33134
ttgctcacacatgagtatcagaatatctatatttggcaaagtttactgattttggcaagtctttttgatatttcatggtactttatgggacgagaaaagttcaaagtcactgtaaccagaaatttcatcataaaaattttaaccgttatttctatttttgtttttgtaagaaatcataatgatttaccaatctatgttgcaatcatggggattggaagtttactaggaagcttatctttatggccctatctcagaaatgaaattaataagccaaatctaagatacctcaacttaaaaaaacatttacattacacagtcatcttatttatcccaacaatcgctacccagatttatctcatagcaaataaatccatgattggacttatggattctgtcactcatgccggattttaccaacaagcagacacaataataaagatggcattatccgtaattggaaccataggtgtcgtcatgttacctcgcattgcaagtatgcactcagaaggaaacatgaaagtaatcagagcatcgatcgtaaaaacatttaatatcgcaacagggatttcatttggtatcttttttggaattctagggattgcactacactttgcaccattcttttttggaaaatcctttgagatggtcggagtgattatgatgctagaagcccccatcattatctttattccaatgagtaatgtatttggtattcaatatctccttccactaaatagaatgagagcttttaccttatcagtaacctttggtgcattattaaatatcataataaattttgctttgataccgttacttggcgtgatcggagcaacggtagcaactgtggtatctgaatttgcagttacagcttaccaatatttatcaatcagaaaagagttttcattcagtgatttatttggtggactttggaagtattttatctcaggctcattgatgtttgtcgtagttttttggatgaatcaatcatttaaaatgacaataattcagctgatactccaaattatcttaggtgtactcatctatactctttctaatatcttattaaagacacagctatggcttatggcctcagaacttttaggaaaaatgaaaaatcgggtatcaagaaatcatatacgtatagatcaaaaacaagaaactctcgaacatccattagatacaattaaagcttcgtttgatcaatttgctatcctctttcaagaaatcgatgaaaaaaaatattatctcataagaactttttga

SEQ ID NO: 18 - protein, 420 aa, Lactococcus lactis subsp. lactis
  33134_wzx
LLTHEYQNIYIWQSLLILASLFDISWYFMGREKFKVTVTRNFIIKILTVISIFVFVRNHNDLPIYVAIMGIGSLLGSLSLWPYLRNEINKPNLRYLNLKKHLHYTVILFIPTIATQIYLIANKSMIGLMDSVTHAGFYQQADTIIKMALSVIGTIGVVMLPRIASMHSEGNMKVIRASIVKTFNIATGISFGIFFGILGIALHFAPFFFGKSFEMVGVIMMLEAPIIIFIPMSNVFGIQYLLPLNRMRAFTLSVTFGALLNIIINFALIPLLGVIGATVATVVSEFAVTAYQYLSIRKEFSFSDLFGGLWKYFISGSLMFVVVFWMNQSFKMTIIQLILQIILGVLIYTLSNILLKTQLWLMASELLGKMKNRVSRNHIRIDQKQETLEHPLDTIKASFDQFAILFQEIDEKKYYLIRTF

SEQ ID NO: 19 - DNA, 969 bp, Lactococcus lactis subsp. lactis
  ORF of the epsL gene of DSM 33134
atggttcagaaaagagctgggcgaataactttatcaagtaaaaaaacaaggaatagcaagaaaggaaaagacatggagcagaaaaagaaaaagaatatttggctgataattgtacctatcttaataataatttcccttataggagcaggggcttatgccttaatagattcacttattcctactgatcatacgaaaacaaacagttcggatcaaccgaccaaaacttcggtttctaatggttatatagagcaaaaaggtgaagaagctgctgtgggtagtatagcacttgtagatgatgctggtgtatcggaatgggttaaggttccctcgaaggcaaatctagataaatttactgatttatctacgaataatatcactatttatcgaattaacaatccggaagtcttaaaaacagttaccaatcgtacggatcaacggatgaaaatgtcagaagttatagctaagtatcataatgctttgattatgaatgcttccgcttttgatatgcagacaggacaagtagctggatttcaaattaataatggaaagttgattcaagactggagtccaggtacaacgactcaatatgcttttgttgttaacaaagatggttcgtgcaaaatatatgattcaagtacacctgcttcaactattattaaaaacggagggcaacaagcctatgattttggtactgcaattatccgtgatggtaaaattcaaccaagtgatggctcagtagattggaagatccatatttttattgcgaatgataaagataataatctctatgctattttgagtgatacaaatgcaggttatgataatataatgaagtcagtgtcaaatttgaagctccaaaatatgttattacttgatagtggtggctcaagtcaactatctgtcaatggtaaaacgattgttgctagtcaagacgatcgagccgtaccggattatattgtgatgaaataa

SEQ ID NO: 20 - protein, 322 aa, Lactococcus lactis subsp. lactis
  33134_epsL
MVQKRAGRITLSSKKTRNSKKGKDMEQKKKKNIWLIIVPILIIISLIGAGAYALIDSLIPTDHTKTNSSDQPTKTSVSNGYIEQKGEEAAVGSIALVDDAGVSEWVKVPSKANLDKFTDLSTNNITIYRINNPEVLKTVTNRTDQRMKMSEVIAKYHNALIMNASAFDMQTGQVAGFQINNGKLIQDWSPGTTTQYAFVVNKDGSCKIYDSSTPASTIIKNGGQQAYDFGTAIIRDGKIQPSDGSVDWKIHIFIANDKDNNLYAILSDTNAGYDNIMKSVSNLKLQNMLLLDSGGSSQLSVNGKTIVASQDDRAVPDYIVMK

SEQ ID NO: 21 - DNA, 903 bp, Lactococcus lactis subsp. lactis
  ORF coding a putative LytR family transcriptional regulator protein of DSM 33134
atgaatcaaaaaaagaggcgtcattatcgtaagaaaaaacacacagtactaaaagttatttcaattatttttgtattagtaattatcgctgttgcttctatagcctacgtagcttatagaaatgttgaatcaaccttttcaacatcatatgaaaatttccctaaaacaacaagtatcgacttaaaaaagtctaaaacattcaccacacttatcattgcaactggtaaaaataattctaaaaatacagcttatgctactgttttagcttcaacgaatgtaaagacaaatcaaactactttcatgaacttcccagtttttgcgacaatgcctaatcaaaaaacaatcactgaagtttacaatacgaatggagatgatggaattttccagatggttaaagacctattgaatgtgtccattaacaaagtaattcagattgatgttaataaaatgggatcacttgtacaggccactggtggaatcaccatgcaaaatccaaaggcattcaatgctgaaggttatgagtttaaacaaggaactgttaatttacaaactgctgatcaagtccaagcctatatgacacaaattgacgatactgatttggatgcttcaatcacccggattcaaaatgtctcaatggaactctacggaaatattcaaaaaattgctcatatgaaaaaacttgaaagtttcaattactatcgagaaattctctatgctttttcaaacactgttaaaaccaatataagtttcaatgatgctaaaacgatcgttatgagctataatacggctctaaagaataccagcaagctcaatctacatacaacagatgaaaatggagctaaggtcgtttctcaaacagaattagactcagtcaaaaccctttttgaaaaatctctaaaataa

SEQ ID NO: 22 - protein, 300 aa, Lactococcus lactis subsp. lactis
  33134_lytR
MNQKKRRHYRKKKHTVLKVISIIFVLVIIAVASIAYVAYRNVESTFSTSYENFPKTTSIDLKKSKTFTTLIIATGKNNSKNTAYATVLASTNVKTNQTTFMNFPVFATMPNQKTITEVYNTNGDDGIFQMVKDLLNVSINKVIQIDVNKMGSLVQATGGITMQNPKAFNAEGYEFKQGTVNLQTADQVQAYMTQIDDTDLDASITRIQNVSMELYGNIQKIAHMKKLESFNYYREILYAFSNTVKTNISFNDAKTIVMSYNTALKNTSKLNLHTTDENGAKVVSQTELDSVKTLFEKSLK

SEQ ID NO: 23 - DNA, 1191 bp, Lactococcus lactis subsp. lactis
  ORF coding a putative nucleotide sugar dehydrogenase protein of DSM 33134
atgtttaatgaaagaaggatcataatgaaaatagcagtagcaggaacaggttatgtaggtttatctctagccacattactaagccaaaaaaatgaggtagttgcacttgatgtaataccagaaaaagtagagaagataaataatagaataagtccaattcaagatgaatacatagaaaaatatttcaaagaaaaagaacttaatttaaaagcaactttagattataaagaagcatttgagaatgcagaatttattataataagtacgccaacaaattatgattcagaaaaaaattattttgacacatcatctgttgaagatataattcagaaagtaaaaagtatgaatatagatacaacaatggttgttaaatcaactattcctgttggatttataaaggcaatgaaagaaagatatcaaatagacaatataatgtttagtcctgaatttttaagagaaggaaaagctttatatgataatttatatccatcaagaataatagtgggagaaaaatcagatagagcagaaaaatttgctaatcttttaaaagaaaattgtttaaaagaagatgtagtagttaaatatatggattctactgaggctgaggcagtaaaattatttgcaaatacatatttagcacttagagttgcatattttaatgaattagatacatatgctgaattaaaaggtttaaatacaaaagatattatagatggagtatgtttagatcctcgtattggaaatcattataacaaccctagttttggctttggggggtattgtcttccaaaggactcgaagcaattaaaggcaaattataaagatgttccagagaatattatcagtgcaatagttgaatctaatagaactagaaaagaccatattgccgatatgatctcaaaaagaaacccaaaagtagttggaatatatagattaacaatgaaatctgggtcagataattttagagctagtgcaattcaaggagttatgaaaagaatcaaagctaaaggaattgaagttgttgtttatgagccaactttaaaagaagataatttctttaatagtaaagtaatcaaagatatagatgaatttaaaaagatatcagatgtcattatagtaaatagacttgatgaaaatgtatctagtgtaaaagataaagtttatacaagagatctattcgctagagattaa

SEQ ID NO: 24 - protein, 396 aa, Lactococcus lactis subsp. lactis
  33134_nucleotide_sugar_dehydrogenase
MFNERRIIMKIAVAGTGYVGLSLATLLSQKNEVVALDVIPEKVEKINNRISPIQDEYIEKYFKEKELNLKATLDYKEAFENAEFIIISTPTNYDSEKNYFDTSSVEDIIQKVKSMNIDTTMVVKSTIPVGFIKAMKERYQIDNIMFSPEFLREGKALYDNLYPSRIIVGEKSDRAEKFANLLKENCLKEDVVVKYMDSTEAEAVKLFANTYLALRVAYFNELDTYAELKGLNTKDIIDGVCLDPRIGNHYNNPSFGFGGYCLPKDSKQLKANYKDVPENIISAIVESNRTRKDHIADMISKRNPKVVGIYRLTMKSGSDNFRASAIQGVMKRIKAKGIEVVVYEPTLKEDNFFNSKVIKDIDEFKKISDVIIVNRLDENVSSVKDKVYTRDLFARD

SEQ ID NO: 25 - DNA, 780 bp, Lactococcus lactis subsp. lactis
  ORF of the epsC gene of DSM 33134
atgcaggaaacacaggaacaaacgattgatttaagagggatttttaaaattattcgcaaaaggttaggtttaatattatttagtgctttaatagtcacaatattagggagcatctacacattttttatagcctccccagtttacacagcctcaactcaacttgtcgttaaactaccaaatttggataattcagcagcctacgctggacaagtgaccgggaatattcaaatggcgaacacaattaaccaagttattgttagtccagtcattttagataaagttcaaagtaatttaaatctatctgatgactctttccaaaaacaagttacagcagcaaatcaaacaaattcacaagtcattacgcttactgttaaatattctaatccttacgttgctcaaaagattgcagacgagactgctaaaatatttagttcagatgcagcaaaactattgaatgttactaacgttaatattctatccaaagcaaaagctcaaacaacacccattagtcctaaacctaaattgtatttagcaatatctgttatagccggattagttttaggtttagccattgctttattgaaggaattgtttgataacaaaattaataaagaagaagatattgaagctctgggactcacggttcttggtgtaacaacctgtgctcaaatgagtgattttaataataatacgaataaaaatggcacgcaatcgggaactaagtcaagtccgcctagcgaccatgaagtaaatagatcatcaaaaaggaataaaagatag

SEQ ID NO: 26 - protein, 259 aa, Lactococcus lactis subsp. lactis
  33134_epsC
MQETQEQTIDLRGIFKIIRKRLGLILFSALIVTILGSIYTFFIASPVYTASTQLVVKLPNLDNSAAYAGQVTGNIQMANTINQVIVSPVILDKVQSNLNLSDDSFQKQVTAANQTNSQVITLTVKYSNPYVAQKIADETAKIFSSDAAKLLNVTNVNILSKAKAQTTPISPKPKLYLAISVIAGLVLGLAIALLKELFDNKINKEEDIEALGLTVLGVTTCAQMSDFNNNTNKNGTQSGTKSSPPSDHEVNRSSKRNKR

SEQ ID NO: 27 - DNA, 687 bp, Lactococcus lactis subsp. lactis
  ORF of the epsE gene of DSM 33134
atgaaagtttttgaggatgccgcatcacctgaatcggaagagcataagttagtagaattaaaaaaattttcttatagagagctaattataaaaagagcaattgatatcctaggaggattagcaggttcagttttatttcttattgcggctgcattactttatctcccttacaaaatgagctcaaaaaaggatcaagggccaatgttctataaacaaaaacgctatggaaaaaacgggaaaattttttatattttgaaatttaggacaatgatagttaatgctgagcagtatttagagctacatccagaagttaaagccgcctatcatgccaatggcaataaactagaaaatgacccccgtgtgacgaagattggttcatttattagacaacactcaattgatgaattaccacaatttatcaatgttcttaaaggggatatggcattggttggcccaagaccaattttgctttttgaagcgaaagaatatggggagcgcctctcttacttactcatgtgtaaacctggaattactggttattggacaacacatggtcgaagtaaagttttttttcctcaacgagcagatttagaactctattacctccagtaccatagcaccaaaaacgatatcaagcttctagtactcacaattgtacaaagtattaacggatcggacgcatattaa

SEQ ID NO: 28 - protein, 228 aa, Lactococcus lactis subsp. lactis
  33134_epsE
MKVFEDAASPESEEHKLVELKKFSYRELIIKRAIDILGGLAGSVLFLIAAALLYLPYKMSSKKDQGPMFYKQKRYGKNGKIFYILKFRTMIVNAEQYLELHPEVKAAYHANGNKLENDPRVTKIGSFIRQHSIDELPQFINVLKGDMALVGPRPILLFEAKEYGERLSYLLMCKPGITGYWTTHGRSKVFFPQRADLELYYLQYHSTKNDIKLLVLTIVQSINGSDAY

SEQ ID NO: 29 - DNA, 324 bp, Lactococcus lactis
  ORF of the epsR gene of DSM 33136
atgtttatgaatgatttattttaccatcgtctaaaggaactagttgaagcaagtggtaaatctgcaaatcaaatagaaagggaattgggttaccctagaaattctttgaataattataagttgggaggagaaccctctgggacaagattaataggactatcagagtattttaatgtgtctccaaaatatctgatgggtataattgatgagcctaatgacagttctgcaattaatctttttaaaactctaactcaagaagagaaaaaagaaatgtttataatttgtcaaaaatggctttttttagaatatcaaatagagttataa

SEQ ID NO: 30 - protein, 107 aa, Lactococcus lactis
  33136_epsR
MFMNDLFYHRLKELVEASGKSANQIERELGYPRNSLNNYKLGGEPSGTRLIGLSEYFNVSPKYLMGIIDEPNDSSAINLFKTLTQEEKKEMFIICQKWLFLEYQIEL

SEQ ID NO: 31 - DNA, 768 bp, Lactococcus lactis
  ORF of the epsX gene of DSM 33136
atgatgaaaaaaggaatttttgtaattactatagtgatatctatagcattgataattggaggtttttatagttataattctaggataagtaatctttcaaaagctgataaaggaaaagaagttgtaaaaaatagcagtgaaaaaaatcagatagaccttacctataaaaagtattataaaaatttaccaaaatcagttcaaaataaaatagatgatatttcatccaaaaataaagaagttactttaacttgtatttggcaatctgattcagttatttctgaacaatttcaacaaaacttacaaaaatattatggaaataagttttggaacatcaaaaatatcacttacaatggcgaaactagtgaacaattattggctgaaaaagttgaaaaccaagtattagccactaatcctgatgttgttttatatgaagctccactttttaatgataaccaaaacattgaagcaacagcctcactgactagtaatgagcaacttataacaaatttggctagtgcaggagcggaggtaatagttcaaccctctccaccgatctatggtggtgttgtgtaccccgtacaagaagaacaatttaaacaatctttatctacaaagtatccctatatagactactgggctagttacccagacaaaaattctgatgaaatgaagggactgttttctgatgatggagtatatagaacattaaatgcttcggggaataaggtttggctagattatattactaaatattttacagcaaactaa

SEQ ID NO: 32 - protein, 255 aa, Lactococcus lactis
  33136_epsX
MMKKGIFVITIVISIALIIGGFYSYNSRISNLSKADKGKEVVKNSSEKNQIDLTYKKYYKNLPKSVQNKIDDISSKNKEVTLTCIWQSDSVISEQFQQNLQKYYGNKFWNIKNITYNGETSEQLLAEKVENQVLATNPDVVLYEAPLFNDNQNIEATASLTSNEQLITNLASAGAEVIVQPSPPIYGGVVYPVQEEQFKQSLSTKYPYIDYWASYPDKNSDEMKGLFSDDGVYRTLNASGNKVWLDYITKYFTAN

SEQ ID NO: 33 - DNA, 765 bp, Lactococcus lactis
  ORF of the epsB gene of DSM 33136
atgattgatattcactgccatattttaccggggatagatgatggagctaaaacttatgaagatactttgaaaatgctgaaatcagcaattgatgaagggataacaactatcactgcgactcctcatcataatcctcaatttaagaatgaatcaccgcttattttgaaaaaagttaaggaagttcaaaatatcattgacgaacatcaattaccaattgaagttttacccggacaagaggtgagaatatatggtgatttattaaaagaattttctgaaggaaagttactgacagcagcgggcacttcaagttatatattgattgaatttccatcaaatcatgtgccagcttatgctaaagaacttttttataatattcaattggagggatttcaacctattttggtccaccctgagcgtaatagtgcaatcattgagaaccctgatctattatttgattttattgaacaaggagtactaagtcagataactgcttcaagtgtcactggtcattttggtaaaaaaatacaaaagctgtcatttaaaatgatagaaaaccatctgacgcattttgttgcatcagatgcgcataatgtgacgtcacgtgcatttaagatgaaggaagcgtttgaaattattgaagatagttatggttctggtgtatcactaatgtttcaaaataatgcagagtcagtgattttaaacgaaagtttttatcaagaaaaaccaacaaagatcaaaacaaagaaatttttaggattattttaa

SEQ ID NO: 34 - protein, 254 aa, Lactococcus lactis
  33136_epsB
MIDIHCHILPGIDDGAKTYEDTLKMLKSAIDEGITTITATPHHNPQFKNESPLILKKVKEVQNIIDEHQLPIEVLPGQEVRIYGDLLKEFSEGKLLTAAGTSSYILIEFPSNHVPAYAKELFYNIQLEGFQPILVHPERNSAIIENPDLLFDFIEQGVLSQITASSVTGHFGKKIQKLSFKMIENHLTHFVASDAHNVTSRAFKMKEAFEIIEDSYGSGVSLMFQNNAESVILNESFYQEKPTKIKTKKFLGLF

SEQ ID NO: 35 - DNA, 696 bp, Lactococcus lactis
  ORF of the epsD gene of DSM 33136
atggctaaaaataaaagaagcatagacaataatcgttatattattaccagtgtcaatcctcaatcacctatttccgaacaatatcgtacgattcgtacgaccattgattttaaaatggcggatcaagggattaaaagttttctagtaacatcttcagaagcagctgcaggtaaatcaaccgagagtgctaatctagctgttgcttttgcacaacaaggtaaaaaagtacttttaattgatggcgatcttcgtaaaccgactgttaacattacttttaaagtacaaaatagagtaggattaaccaatattttaatgcatcaatcttcgattgaagatgccatacaagggacaagactttctgaaaatcttacaataattacctctggtccaattccacctaatccatcggaattattagcatctagtgcaatgaagaatttgattgactctgtgtccgattcctttgatgttgttttgattgatactccacctctctctgcagttactgatgctcaaattttgagtatttatgtaggaggagtggttcttgttgtacgtgcctatgaaacaaaaaaagagagtttagcaaaaacaaaaaaaatactggaacaagttaatgtaaatatattaggagttgttttgcatggggtagactcttctgactcaccgtcgtattactactacggagtagagtaa

SEQ ID NO: 36 - protein, 231 aa, Lactococcus lactis
  33136_epsD
MAKNKRSIDNNRYIITSVNPQSPISEQYRTIRTTIDFKMADQGIKSFLVTSSEAAAGKSTESANLAVAFAQQGKKVLLIDGDLRKPTVNITFKVQNRVGLTNILMHQSSIEDAIQGTRLSENLTIITSGPIPPNPSELLASSAMKNLIDSVSDSFDVVLIDTPPLSAVTDAQILSIYVGGVVLVVRAYETKKESLAKTKKILEQVNVNILGVVLHGVDSSDSPSYYYYGVE

SEQ ID NO: 37 - DNA, 1122 bp, Lactococcus lactis
  ORF coding a putative GT1 protein of DSM 33136
atgaaaaaaaagaaattattactaataagtcaaagcggaagaggtggagtaaggaggcatttgtgtgatcttatgcttaacctcgattatgaaattttcgaggtatgggttgcttacaatgatgatgctattgatgatatatttagacaaacaatagagcaattatcaggaaaaattactcctatactaataaataatcttgtcagggaattaaatttaaaggaggatataaaagcatatttaaaattaagcaaactaataaagaaagtcaagccggatattgtacattgtcacagttctaaagctggtgttattggtcgtttagctgccaaaagacgaggtgttaaaaaaatattttatacgccacatgcttattcgtttttggcacctgaatttagtggaaagaaaaagtttctttttgttcaaattgaaaagtttttaagccgattttcgacaactcagacattttgtgtgtcaataggggaaatgcaagctgctcttgaagtaaatctagataaaaccgataagtttcaggtaatttataatggtttgccagaaattgatttaccaagcaaagaaacgattcgggcgcaattaggactggaaaagacagtagttgttataggcaataacgcaagaatgtcggaacagaaaaatcctatgttttttatggaaattgcccaaaaaatgattagacaaaacgcaaattggcattttgtgtgggcaggtgatggtcagcttatgccactttttcaatcatttattaagcaaaatggactagagaaaaatattcatttgcttggggagcgtcctgatagtgaaacagttgtgacagcctatgacatcttcttgacgacttcccaatatgaaggtttaccttatgcaccaattgaagcgatgcgagctggtgtcccgattcttgcgacaaatgttgttggcaatagtgagcttgtgatagagggaaaaaatggttatttgatcgacttagagtggtcaaaatctgtcgaagaaaaattatataaggcagcgaaaatggatgcacaaatgattaaagcagattttaggcaaaggtttgcgattgatcagatgttaaagcaaattgaaacaatttatttagcttga

SEQ ID NO: 38 - protein, 373 aa, Lactococcus lactis
  33136_GT1
MKKKKLLLISQSGRGGVRRHLCDLMLNLDYEIFEVWVAYNDDAIDDIFRQTIEQLSGKITPILINNLVRELNLKEDIKAYLKLSKLIKKVKPDIVHCHSSKAGVIGRLAAKRRGVKKIFYTPHAYSFLAPEFSGKKKFLFVQIEKFLSRFSTTQTFCVSIGEMQAALEVNLDKTDKFQVIYNGLPEIDLPSKETIRAQLGLEKTVVVIGNNARMSEQKNPMFFMEIAQKMIRQNANWHFVWAGDGQLMPLFQSFIKQNGLEKNIHLLGERPDSETVVTAYDIFLTTSQYEGLPYAPIEAMRAGVPILATNVVGNSELVIEGKNGYLIDLEWSKSVEEKLYKAAKMDAQMIKADFRQRFAIDQMLKQIETIYLA

SEQ ID NO: 39 - DNA, 1083 bp, Lactococcus lactis
  ORF of a putative wzy gene of DSM 33136
atggcaatttattttttacttttcccgatgatcgcaatgatttatttaatgacattgctcttacgacaaaaagcacaaatccaaaaaacgattttttgtgttcttacgtttggtacactaggctttatttcagcaagtcgtgcttcaagtgttgggacagatgttacgctatacgaaaatatttttaaatctataaattacgggataagtgctgaaaataatttgggatatgtcatctataacaagttgattggtagtgtatttggctatacgggacatgaaatcacagctgctaattctgttttgattacgatacttattggtttttttatttggaaagtagcggaacattattttgttgcgacgtttttatacattagcttgttttattatgctacaagttttaatatttcaagacaatttattgccatggggcttgtattggtagcaatttcttttgctttagataaaaaggttatgccttggtttatcttgacagttttggctaccttatttcatgcgacagcaatcgtttcttttcctgtctattggcttacaaaagtacattgggatgtgaaaaagacattaggtatttttccaattacgatttttgcaagttttatttttgatgctattttaaacatttttttacgttttttcccacattatgagatgtatattactggaacacaatttaatattgcagatcaggggcagggacgtgtggttttggtcaaaatatttatcttgctcattttgtttactttaatcttgttttataaaaaaagctatgctttgatttctgaatgtcatcaaagtttgatagctttgacaaccgttggattaagtatcggtattgtattttataataatattttactcaatagaatagaaatgttttattcaattttaagcatcgtatttattccaattgctatagattactttagtttgaaatttaaagaaaaagatactgtgcgacaaatgctgacgataggtattttgttaattacacttgtgccttactatatacaggttagcggtaattattcaggaatattgccatatacgatgaataaatag

SEQ ID NO: 40 - protein, 360 aa, Lactococcus lactis
  33136_wzy
MAIYFLLFPMIAMIYLMTLLLRQKAQIQKTIFCVLTFGTLGFISASRASSVGTDVTLYENIFKSINYGISAENNLGYVIYNKLIGSVFGYTGHEITAANSVLITILIGFFIWKVAEHYFVATFLYISLFYYATSFNISRQFIAMGLVLVAISFALDKKVMPWFILTVLATLFHATAIVSFPVYWLTKVHWDVKKTLGIFPITIFASFIFDAILNIFLRFFPHYEMYITGTQFNIADQGQGRVVLVKIFILLILFTLILFYKKSYALISECHQSLIALTTVGLSIGIVFYNNILLNRIEMFYSILSIVFIPIAIDYFSLKFKEKDTVRQMLTIGILLITLVPYYIQVSGNYSGILPYTMNK

SEQ ID NO: 41 - DNA, 972 bp, Lactococcus lactis
  ORF coding a putative GT2 protein of DSM 33136
atgtatatacataatctaatttccgtcattattccagtatataatgtagaaaaatatttagaaaagtgtttgaagtctgttcaaaatcagagttatgcgcattttgaagtgatcttaatcaacgatggttcaacggattcttctttaaaaatttgtgaggcatttatcaaaaaagataagcgcttttctgttttaacaaaagaaaatggtggactttcttcggctcgaaatttgggtttaaaaaaaatcaggggaaaatatgtgacatttgtggatagtgacgattatctatcagagcattatcttaaacattttgtgagtggtatagagagtgaaaagagtatcgtttgttcaaaatttcttcttgttgatgaaaatggtgtttttctttctaaaagacagagaattcaagaaaaaaaacttattttttctaaagaagaaggcataaaagaaattttattacaaaataaaatggatcactcagcttggggaaaattatatccgatatctttttttgaaaatatcacttttccagatggaaaattgtttgaagatatgggaacgacctataagttattggctttagctaacgaagttgtatttttagatgaatatgattattattatcttcaacaacccaatagcattatgaacagttcatttaatttaaaaaaattagatattatagatatgtcaaaggaaatgattaaagatatcgttaatacctgccctcaacttgtgaattatgctaaaaatagagcatttagtgcagaggcaggtatctttttagatgtgccaaatactaaagcgtttgaatcggcgcaaaagctgctttggaaagaagtaagagaaaatagatatgcaccatttttgataaaaggggctagacttaagaataagttaggtgctattttgtcgtttttgggtaggagattttttttgaaactcgggaaacagttggtaggtaaataa

SEQ ID NO: 42 - protein, 323 aa, Lactococcus lactis
  33136_GT2
MYIHNLISVIIPVYNVEKYLEKCLKSVQNQSYAHFEVILINDGSTDSSLKICEAFIKKDKRFSVLTKENGGLSSARNLGLKKIRGKYVTFVDSDDYLSEHYLKHFVSGIESEKSIVCSKFLLVDENGVFLSKRQRIQEKKLIFSKEEGIKEILLQNKMDHSAWGKLYPISFFENITFPDGKLFEDMGTTYKLLALANEVVFLDEYDYYYLQQPNSIMNSSFNLKKLDIIDMSKEMIKDIVNTCPQLVNYAKNRAFSAEAGIFLDVPNTKAFESAQKLLWKEVRENRYAPFLIKGARLKNKLGAILSFLGRRFFLKLGKQLVGK

SEQ ID NO: 43 - DNA, 990 bp, Lactococcus lactis
  ORF coding a putative GT3 protein of DSM 33136
ttggaggaaataaattatatgatgaagatatcagttattgttcctgtttataatagtgaaaacacaattgaaaagtgtttaatttcattgcaaaagcaaacatataaaaatttagaaattattgtaataaatgatggttcagtggatacaacagaagataaaatagtaagaattatagagaatgataaaagatttatttattttaaaactgccaatcaaggacaatctgaagcgaggagttttggattgagtaaagcaactggagagttaataggattcgttgattcagatgattttatagattatgatatgtatgaaatattagaaaaaaatatgagagatacaaaatcagatatttcaattataagatcgataatatcatttccaaatggattcgaaataatacctagctgtcaaaatactttttttatcaaaacaggtaatgaaatgatatttgagtatattggtggttttcattttggggttgccctatgggataaactttataaaagaagtttatttgatggattaaaattagatacttcttttaatttaatggaagatgctttaatgggtaactatgtgtttaataaagcgaaaaaaattgtttatacaggaaaagcaaagtatcattatttgcagagaaaaaacagtacagccagaaaaaatttggaagatagtgatttaaaggcaataggtgttgtcttgggtatgaaagagctttatactgatagcattgagttagataaagcatttcaacgcagatttgcacaaacaatactggaattactcagcaaaaatcccacaaaagaacaacgaaaacaaatagagagagctttgtttgaaacaatagaattagataaattgggttatttaaaaaagggtgataagttgctaataagattgatctattataaatttccgtcatctcccttaattcaagccaaaaaaatgattggacgaacagtaagaaaatttaagaagatatag

SEQ ID NO: 44 - protein, 329 aa, Lactococcus lactis
  33136_GT3
LEEINYMMKISVIVPVYNSENTIEKCLISLQKQTYKNLEIIVINDGSVDTTEDKIVRIIENDKRFIYFKTANQGQSEARSFGLSKATGELIGFVDSDDFIDYDMYEILEKNMRDTKSDISIIRSIISFPNGFEIIPSCQNTFFIKTGNEMIFEYIGGFHFGVALWDKLYKRSLFDGLKLDTSFNLMEDALMGNYVFNKAKKIVYTGKAKYHYLQRKNSTARKNLEDSDLKAIGVVLGMKELYTDSIELDKAFQRRFAQTILELLSKNPTKEQRKQIERALFETIELDKLGYLKKGDKLLIRLIYYKFPSSPLIQAKKMIGRTVRKFKKI

SEQ ID NO: 45 - DNA, 1398 bp, Lactococcus lactis
  ORF of a putative wzx gene of DSM 33136
atgaataaatacaaaaaactgctatccaactcactcgttttcacaataggaaatttgggtagcaaactgttagtctttttactcgtaccactctacacttatgcgatgacaccgcaagagtatggtatggcagacttgtaccaaacaacagccagtctacttttgccattgattacgatgaatgtgtttgatgcaactttacgttttgccatggaaaagtcaatgacaaaagagagcgtcttaacaaattctcttgtagtatggtgttttagcgctgtgttctcttgtttcggcatgatttttgtctatgcactgaacttgagtaataaatggtacttagccctactttttcttatcatcttattccaaggtgggcaaagcatactaagtcaatatgcgagaggcattgggaaatcgaaattatttgcagctggcggagttattttaacctttttgacaggtgctttaaatatcttcttcttggtatttttacatgctggaattacgggctacctcatgtccctagttttagcgaatttagggacaatccttttttttgcggggacactttccatttggcaggcaatcaattttaaagtaatcgataaggaaatgatttggcaaatgctctattatgccttacctttaattcctaatgccatcatgtggtggtcactgaacgcttctaatcgctatttcgttttattctttttaggagcaggtgctaatggccttttggcggtcgctaccaaaatcccaagtattatttcaatttttaatacgatttttacacaggcatggcaaatttcagccatagaagaatataattctcatcaaaaatcaaaatattattcggatgtttttcactacttagcaacttttctattgttagggacatcagcttttatgattgtgcttaaaccagttgtcgaaaaagtcgtttcaagtgactatgcaagttcatggcaatatgtccccttctttatgttggcgatgttattttcctcattttctggattttttgggaccaattatattgcggccaaacaaacaaaaggcgtatttatgacatctatctatggtgccattgtttgtgtcctactccaagtggtgctgctacccaccattggcttgaatggtgctggattagcttcaatgctaggattcttgacaacatttttattgcgtgttaaagatacgcaaaaatttgtggcgattcagattaaatggcgaatttttatcagtaatttattgatcgttttggcacaaattttatgtttgttttatctaccgagtgaatttttgtattttggtcttgcccttttgttttgtggcatgttagttgttaatcagcgtacaattttatacattatcatggcgctaaaaaataaaaaataa

SEQ ID NO: 46 - protein, 465 aa, Lactococcus lactis
  33136_wzx
MNKYKKLLSNSLVFTIGNLGSKLLVFLLVPLYTYAMTPQEYGMADLYQTTASLLLPLITMNVFDATLRFAMEKSMTKESVLTNSLVVWCFSAVFSCFGMIFVYALNLSNKWYLALLFLIILFQGGQSILSQYARGIGKSKLFAAGGVILTFLTGALNIFFLVFLHAGITGYLMSLVLANLGTILFFAGTLSIWQAINFKVIDKEMIWQMLYYALPLIPNAIMWWSLNASNRYFVLFFLGAGANGLLAVATKIPSIISIFNTIFTQAWQISAIEEYNSHQKSKYYSDVFHYLATFLLLGTSAFMIVLKPVVEKVVSSDYASSWQYVPFFMLAMLFSSFSGFFGTNYIAAKQTKGVFMTSIYGAIVCVLLQVVLLPTIGLNGAGLASMLGFLTTFLLRVKDTQKFVAIQIKWRIFISNLLIVLAQILCLFYLPSEFLYFGLALLFCGMLVVNQRTILYIIMALKNKK

SEQ ID NO: 47 - DNA, 918 bp, Lactococcus lactis
  ORF of the epsL gene of DSM 33136
ttggaggaaaaattggaacgaaaaaaaaagaaaaaaaagaatatttgggttataattatacctatcttaatttttattacccttataggagcaggggcttatgccttaagaaattcacttattcctactgatcatacgaaaacaaatagttcggatcaaccgcccaaaacttcggcttccaacggttatgtagaacaaaaaggcgaagaagctgccgtaggtagtatagcacttgtagatgatgctggtgtaccagagtgggttaaagttccctcaaaggtaaatctagataaatttactgatttatctacgaataatatcactatttatcgaattaacaatccggaagtcttaaaaacagttaccaatcgtacagatcaacggatgaaaatgtcagaagttatagctaagtatcctaatgctttgattatgaatgcttccgcatttgatatgcagacaggacaagtagttggatttcaaattaataatggaaagttgattcaagactggagcccaggtacaacgactcaatatgcttttgttattaacaaagatggttcgtgcaaaatttatgattcaagtacacctgcttcaactattattaaaaacggagggcaacaagcctatgatttttatggtactgcaattatccgtgatggtaaaattcaaccaagtgatggctcagtagattggaagatccatatttttattgcgaatgataaagataataatctctatgctattttgagtgatacaaatgcaggttatggtaatataatgaagtcagtgtcaaatttgaagctccaaaatatgttattacttgatagtggcggctcaagtcaactatctgtcaatggtaaaacgattgctgctagtcaagacgatcgagccgtaccggattatattgtgatgaaataa

SEQ ID NO: 48 - protein, 305 aa, Lactococcus lactis
  33136_epsL
LEEKLERKKKKKKNIWVIIIPILIFITLIGAGAYALRNSLIPTDHTKTNSSDQPPKTSASNGYVEQKGEEAAVGSIALVDDAGVPEWVKVPSKVNLDKFTDLSTNNITIYRINNPEVLKTVTNRTDQRMKMSEVIAKYPNALIMNASAFDMQTGQVVGFQINNGKLIQDWSPGTTTQYAFVINKDGSCKIYDSSTPASTIIKNGGQQAYDFYGTAIIRDGKIQPSDGSVDWKIHIFIANDKDNNLYAILSDTNAGYGNIMKSVSNLKLQNMLLLDSGGSSQLSVNGKTIAASQDDRAVPDYIVMK

SEQ ID NO: 49 - DNA, 903 bp, Lactococcus lactis
  ORF coding a putative LytR family transcriptional regulator protein of DSM 33136
atgaatcaaaaaaagaggcatcattatcgtaagaaaaaacacacagtactaaaagttatttcaattatttttgtattagtaattatcgctgttgcttctatagcctacgccgcttatagaaatgttgaatcaacattttcaacatcatatgaaaatttccctaaaacaacaagtatcgacttaaaaaagtctaaaacattcaccacacttatcattgcaactggtaaaaataattctaaaaatacagcttatgctactgttttagcttcaacgaatgtaaagacaaatcaaactactttcatgaacttcccagtttttgcgacaatgcctaatcaaaaaacaatcactgaagtttacaatacgaatggagatgatggaattttccagatggttaaagacctattgaatatgtccattaataaagtaattcagattgatgttaataaaatgggatcacttgtacaggccactggtggaatcaccatgcaaaatccaaaggcattcaatgctgaaggttatgagtttaaacaaggaactgttaatttacaaactgctgatcaagtccaagcctatatgacacaaattgacgatactgatttggatgcttcaatcactcgaattcaaaatgtctcaatggaactctacggaaatattcaaaaaattgctcatatgaaaaaacttgaaagtttcaattactatcgagaaattctctatgctttttcaaacactgttaaaaccaatataagtttcaatgatgctaaaacgatcgttatgagctacaataaggctctaaagaataccagcaagctcaatctacatacaacagatgaaaatggagctaaggtcgtttctcaaacagaattagactcagtcaaaaccctttttgaaaaatctctaaaataa

SEQ ID NO: 50 - protein, 300 aa, Lactococcus lactis
  33136_lytR
MNQKKRHHYRKKKHTVLKVISIIFVLVIIAVASIAYAAYRNVESTFSTSYENFPKTTSIDLKKSKTFTTLIIATGKNNSKNTAYATVLASTNVKTNQTTFMNFPVFATMPNQKTITEVYNTNGDDGIFQMVKDLLNMSINKVIQIDVNKMGSLVQATGGITMQNPKAFNAEGYEFKQGTVNLQTADQVQAYMTQIDDTDLDASITRIQNVSMELYGNIQKIAHMKKLESFNYYREILYAFSNTVKTNISFNDAKTIVMSYNKALKNTSKLNLHTTDENGAKVVSQTELDSVKTLFEKSLK

SEQ ID NO: 51 - DNA, 1161 bp, Lactococcus lactis
  ORF coding a putative polysaccharide pyruvyl transferase family protein of DSM 33136
atgaaaaattatgtaaatggttggtggaaaaccaatttaggagatgatcttttcttacatataatatgtgaacgttatagaaatcaaagtttttttataacttgtgaaaaagaggagatgactgtttttcaacatttgaataacttaaaaattattgaagagaataaaagttctgtcgttattaaattgttttcgaagtttttaagagtaatgtatttttggataccattaagtgttttgaaagaatggatagaattattctttttaagaaaaagaggaatatctgataaaaatgtagtggttattgaaattgggggctccatttttatgatgccaaaaagaaaagatatctcaatgacagaggggtattttttacgtaatattgaattaaaaaactttcctaactattatgtagtaggaagtaattttggtccattttattttcaagagcaagtagataaatataaagaactattttctaaaatgcaggatgtatgtttcagagatacatattcaaaaaaattatttccaaatctagatacagttagaagcgcgacagatgttgtcatgagtttaaggatagaggattatcaacaaatcccagagaaaaaacaaattataatttctgtgattgatgtattatctaaagaagatacaggattagagggtaaacatcattttgcaaataaatatgaaaaatttattttatctgtaacagaagattatgtaaagaaaggttataaagtagtattgttttctttttgtgatttccagaatgatcatttattttctcagaaaattttcaatcagttaaataagacaataagatctaatgttgaacttttttctcataaacaaataaataaatcactctctaagattgctgaaagtgaaaaaatcatagcgaccagatttcacgcaatgattttaggatggttatttcaaaagcctacttttgtaatctcctacagtcaaaagacaactcaagtgattgaaaatagctttaataagcaaacatttgttgactataataaggtagaaaagttgaatcttaataatatggatgattattttgttaaaattgatgatttgaccaaagaatatttaattaatgatgcgcaaaatcaatttagagggttagactcattattgcaatcataa

SEQ ID NO: 52 - protein, 386 aa, Lactococcus lactis
  33136_polysaccharide_pyruvyl_transferase
MKNYVNGWWKTNLGDDLFLHIICERYRNQSFFITCEKEEMTVFQHLNNLKIIEENKSSVVIKLFSKFLRVMYFWIPLSVLKEWIELFFLRKRGISDKNVVVIEIGGSIFMMPKRKDISMTEGYFLRNIELKNFPNYYVVGSNFGPFYFQEQVDKYKELFSKMQDVCFRDTYSKKLFPNLDTVRSATDVVMSLRIEDYQQIPEKKQIIISVIDVLSKEDTGLEGKHHFANKYEKFILSVTEDYVKKGYKVVLFSFCDFQNDHLFSQKIFNQLNKTIRSNVELFSHKQINKSLSKIAESEKIIATRFHAMILGWLFQKPTFVISYSQKTTQVIENSFNKQTFVDYNKVEKLNLNNMDDYFVKIDDLTKEYLINDAQNQFRGLDSLLQS

SEQ ID NO: 53 - DNA, 780 bp, Lactococcus lactis
  ORF of the epsC gene of DSM 33136
atgcaggaaacacaggaacaaacgattgatttaagagggatttttaaaattattcgcaaaaggttaggtttaatattatttagtgctttaatagtcacaatattagggagcatctacacattttttatagcctccccagtttacacagcctcaactcaacttgtcgttaaactaccaaattcggataatttagcagcctacgctggacaagtaaccgggaatattcaaatggcgaacacaattaaccaagttattgttagtccagtcattttagataaagttcaaagtaatttaaatctatctgatgattctttccaaaaacaagttacagcagcaaatcaaacaaattcacaagtcattacgcttactgttaaatattctaatccttacgttgctcaaaagattgcagacgagactgctaaaatatttagttcagatgcagcaaaactattgaatattactaacgttaatattctatccaaagcaaaagctcaaacaacacccattagtcctaaacctaaattgtatttagcaatatctgttatagccggattagttttaggtttagccattgctttattgaaggaattgtttgataacaaaattaataaagaagaagatattgaagctctgggactcacggttcttggtgtaacaacctatgctcaaatgagtgattttaataataatacgaataaaaatggcacgcaatcgggaactaagtcaagtccgcctagcgaccatgaagtaaatagatcatcaaaaaggaataaaagatag

SEQ ID NO: 54 - protein, 259 aa, Lactococcus lactis
  33136_epsC
MQETQEQTIDLRGIFKIIRKRLGLILFSALIVTILGSIYTFFIASPVYTASTQLVVKLPNSDNLAAYAGQVTGNIQMANTINQVIVSPVILDKVQSNLNLSDDSFQKQVTAANQTNSQVITLTVKYSNPYVAQKIADETAKIFSSDAAKLLNITNVNILSKAKAQTTPISPKPKLYLAISVIAGLVLGLAIALLKELFDNKINKEEDIEALGLTVLGVTTYAQMSDFNNNTNKNGTQSGTKSSPPSDHEVNRSSKRNKR

SEQ ID NO: 55 - DNA, 687 bp, Lactococcus lactis
  ORF of the epsE gene of DSM 33136
atggaagtttttgaagatacctcatcacctgaaccgaaagaagaaaagttagtagaactaaaaaaattttctcacagagaaatatttattaaaagaggaattgacattttagggggattagtgggttcaattttgtttcttattgcggctgcattgctttatgtcccttacaaaatgagctcggaaaaagatcaagggccaatgttctataaacaaaaacggtatggaaaaaacggtaaaattttttatattttaaaatttagaacaatgattcttaatgctgagcagtatctagagctacattcagaagttaaagccgcctatcatgccaatggtaataaactagaaaatgatccacgggtaacgaagattggttcatttattagacaatactcagttgatgaattaccacaatttatcaatgtccttaaaggagatatggcattagtcggtccaaggccaattcaacagtttgaagcgaaagaatttggggagcgcctcccttatttactgatatgtaaacctggaattactggttattggacaacacatggtcgcagtaaagctccttttcctcaacgagcagatttagaactctattatctccaatatcacagcaccaagaatgatatcaagcttcttatgcttacaattgcacaaattattcacggatcggacgcatattaa

SEQ ID NO: 56 - protein, 228 aa, Lactococcus lactis
  33136_epsE
MEVFEDTSSPEPKEEKLVELKKFSHREIFIKRGIDILGGLVGSILFLIAAALLYVPYKMSSEKDQGPMFYKQKRYGKNGKIFYILKFRTMILNAEQYLELHSEVKAAYHANGNKLENDPRVTKIGSFIRQYSVDELPQFINVLKGDMALVGPRPIQQFEAKEFGERLPYLLICKPGITGYWTTHGRSKAPFPQRADLELYYLQYHSTKNDIKLLMLTIAQIIHGSDAY

SEQ ID NO: 57 - DNA, 318 bp, Lactococcus lactis; identical to SEQ ID NO: 1
  ORF of the epsR gene of DSM 33139

SEQ ID NO: 58 - protein, 105 aa, Lactococcus lactis; identical to SEQ ID NO: 2
  33139_epsR

SEQ ID NO: 59 - DNA, 768 bp, Lactococcus lactis
  ORF of the epsX gene of DSM 33139
atgatgaaaaaaggaatttttgtaattactatagtgatatctatagcatttataattgtaggtttttatagttataattctaggataaataatctttcaaaagctgataaaggaaaagaagttgtaaaaaatagcagtgaaaaaaatcagatagaccttacctataaaaagtattataaaaatttaccaaaatcagttcaaaataaaatagatgatatttcatccaaaaataaagaagttactttaacttgtatttggcaatctgattcagttatttctgaacaatttcaacaaaacttacaaaaatattatggaaataagttttggaacatcaaaaatatcacttacaatggcgaaactagtgaacaattattggctgaaaaagttgaaaaccaagtattagccactaatcctgatgttgttttatatgaagctccactttttaatgataaccaaaacattgaagcaacagcctcactgactagtaatgagcaacttataacaaatttggctagtgcaggagcggaggtaatagttcaaccctctccaccgatctatggtggtgttgtgtaccccgtacaagaagaacaatttaaacaatctttatctacaaagtatccctatatagactactgggctagttacccagacaaaaattctgatgaaatgaaggggctgttttctgatgatggagtatatagaacattaaatgcttcggggaataaggtttggctagattatattactaaatattttacagcaaactaa

SEQ ID NO: 60 - protein, 255 aa, Lactococcus lactis
  33139_epsX
MMKKGIFVITIVISIAFIIVGFYSYNSRINNLSKADKGKEVVKNSSEKNQIDLTYKKYYKNLPKSVQNKIDDISSKNKEVTLTCIWQSDSVISEQFQQNLQKYYGNKFWNIKNITYNGETSEQLLAEKVENQVLATNPDVVLYEAPLFNDNQNIEATASLTSNEQLITNLASAGAEVIVQPSPPIYGGVVYPVQEEQFKQSLSTKYPYIDYWASYPDKNSDEMKGLFSDDGVYRTLNASGNKVWLDYITKYFTAN

SEQ ID NO: 61 - DNA, 765 bp, Lactococcus lactis
  ORF of the epsB gene of DSM 33139
atgattgatattcattgccatattttaccggggatagatgatggagctaaaacttctggagatactctgacaatgctgaaatcagcaattgatgaagggataacaactatcactgcgactcctcatcataatcctcaatttaataatgaatcaccgcttattttgaaaaaagttaaggaagttcaaaatatcattgacgaacatcaattaccaattgaagttttacccggacaagaggtgagaatatatggtgatttattaaaagaattttctgaaggaaagttactgacagcagcgggcacttcaagttatatattgattgaatttccatcaaatcatgtgccagcttatgctaaagaacttttttataatattcaattggagggacttcaacctattttggttcaccctgaacgtaatagtggaatcattgagaacccagatatattatttgattttgttgaacaaggagtactaagtcagataacagcttcgagtgtcactggtcattttggtaaaaaaatacaaaagctgtcatttaaaatgatagaaaaccatctgacgcattttgttgcatcagatgcgcataatgttacgtcacgtgcatttaagatgaaggaagcttttgaaatgattgaagatagttatggttctgatgtatcacgaatgtttcaaaataatgcagagtcagtgattttaaacgaaagtttttatcaagaaaaaccaacaaagatcaaaacaaagaaatttttaggattattttaa

SEQ ID NO: 62 - protein, 254 aa, Lactococcus lactis
  33139_epsB
MIDIHCHILPGIDDGAKTSGDTLTMLKSAIDEGITTITATPHHNPQFNNESPLILKKVKEVQNIIDEHQLPIEVLPGQEVRIYGDLLKEFSEGKLLTAAGTSSYILIEFPSNHVPAYAKELFYNIQLEGLQPILVHPERNSGIIENPDILFDFVEQGVLSQITASSVTGHFGKKIQKLSFKMIENHLTHFVASDAHNVTSRAFKMKEAFEMIEDSYGSDVSRMFQNNAESVILNESFYQEKPTKIKTKKFLGLF

SEQ ID NO: 63 - DNA, 696 bp, Lactococcus lactis
  ORF of the epsD gene of DSM 33139
atggctaaaaataaaagaagcatagacaataatcgttatattattaccagtgtcaatcctcaatcacctatttccgaacaatatcgtacgattcgtacgaccattgattttaaaatggcggatcaagggattaaaagttttctagtaacatcttcagaagcagctgcaggtaaatcaaacgagagtgctaatctagctgttgcttttgcacaacaaggtaaaaaagtacttttaattgatggcgatcttcgtaaaccgactgttaacattacttttaaagtacaaaatagagtaggattaaccaatattttaatgcatcaatcttcgattgaagatgccatacaagggacaagactttctgaaaatcttacaataattacctctggtccaattccacctaatccatcggaattattagcatctagtgcaatgaagaatttgattgactctgtgtccgattcctttgatattgttttgattgatactccacctctctatgcagttactgatgctcaaattttgagtgtatatgtaggaggagtggttcttgttgtacgtgcctatgaaacaaaaaaagagagtttagcaaaaacaaaaaaaatactggaacaagttaatgcaaatatattaggagttgttttgcatggggtagactcttctgagtcaccgtcgtattactactacggagtagagtaa

SEQ ID NO: 64 - protein, 231 aa, Lactococcus lactis
  33139_epsD
MAKNKRSIDNNRYIITSVNPQSPISEQYRTIRTTIDFKMADQGIKSFLVTSSEAAAGKSNESANLAVAFAQQGKKVLLIDGDLRKPTVNITFKVQNRVGLTNILMHQSSIEDAIQGTRLSENLTIITSGPIPPNPSELLASSAMKNLIDSVSDSFDIVLIDTPPLYAVTDAQILSVYVGGVVLVVRAYETKKESLAKTKKILEQVNANILGVVLHGVDSSESPSYYYYGVE

SEQ ID NO: 65 - DNA, 1125 bp, Lactococcus lactis
  ORF coding a putative GT1 protein of DSM 33139
atggaagaaaaaatcagacttgcggttttcggacagaaacgtctttctcgtgaaggcggaatagagattgttgtaaaagagttatgcacccgaatggcacagaagggttgtgatgtaacttgctacaatagagcaggccatcatgtgagtggtgcagagtatgacaaaacaattgaatatgatggtatccgtcaaaaggttgttccgactattgagaagaagggacttgcggcggtaagctcctcctttttcgcagcactttgtagtgcatttggaagatacgatgtggtgcatatccatgcggaaggtcctgcctttttctgttggataccaaaactttttggcaagcgtgtaatcagcactattcacggtttggactgggcccgcgaaaaatggaaatttggcgttggatctaaatttatccggcagggtgaaaaaaatgccgtgaaatatgcagatgaaatcattgttctaagcaaaggcgttcagaaatatttcatggagacctacggaagggagacacattttatccctaatagtgtcaatcggccagaggttcgggaggcaaagctgatcacggatcattttggactggaaaaggattcctacatactgttcctcggtcgtctggtgccggagaaggggattcgatatctggttgaggcattcaagaatgtcaagacagataaaaaactggtcatcgcaggtggctctagtgatacggattcctttatggaggaattgaaagaactggcgaagggtgacgatcggattctctttactgggtttgtgcagggagcaatgctggatgaactgtacagcaacgcttacatctacacgctgccgtccgatctggaaggaatgccattaagtctgctggaggcgatgagctacggaaattgctgtctggtatccgatattccagaatgtgcagaggttgtggaagataaggcattgattttcaaaaagtcagatgtagaggacttgcgagaaaaattgcaagatgcctgtgaccatccagaaatggttataagaatgaagaatcaggcagctgactttatctgcgagaaatacaactgggataaagttgtaaaggaaacgatgaaactgtacaggagaaaataa

SEQ ID NO: 66 - protein, 374 aa, Lactococcus lactis
  33139_GT1
MEEKIRLAVFGQKRLSREGGIEIVVKELCTRMAQKGCDVTCYNRAGHHVSGAEYDKTIEYDGIRQKVVPTIEKKGLAAVSSSFFAALCSAFGRYDVVHIHAEGPAFFCWIPKLFGKRVISTIHGLDWAREKWKFGVGSKFIRQGEKNAVKYADEIIVLSKGVQKYFMETYGRETHFIPNSVNRPEVREAKLITDHFGLEKDSYILFLGRLVPEKGIRYLVEAFKNVKTDKKLVIAGGSSDTDSFMEELKELAKGDDRILFTGFVQGAMLDELYSNAYIYTLPSDLEGMPLSLLEAMSYGNCCLVSDIPECAEVVEDKALIFKKSDVEDLREKLQDACDHPEMVIRMKNQAADFICEKYNWDKVVKETMKLYRRK

SEQ ID NO: 67 - DNA, 1296 bp, Lactococcus lactis
  ORF of a putative wzy gene of DSM 33139
atgcacttatatgttagtaaaaaagctatattacagtatttaatgctgtatgtcatgttgattttttgtcaaacacatgtgtatagattatatattagatcaaatttgacgatacatgttggtttagtaatattatttttaataattggtgtagtcaattttaggaaaaaaacaaaacgaccttttttgatgtgtgcttttttgttagcaatggttataggggttcgttttattaatggtggtgtaggaattgatttttgggctgaaatggccgcaaaaatactaattacatatattgctatattgattgatcctgaacagtttttaaccagatttgtaaagattataacgttttttgcggcaattagtattgtgggatggctgcaacagattgctggtttgaatattatgcaaaaaatcggcatggtaaataacgatttttacacaacagtaacatgggataaaggttatgttgaagaaactcagcgtaagatttatgggttgttgttttatgtgacgacagatgtagaaattaaacgtaatatgagtattttcacggagcctggtatatatcaaatggtattgaatgctgccatttttgtagtagcgttttgtaataaactcattgaattaaatcctaaagaaattaaaaaatattttttaattctaacaattgcattaattacaacgcagtcgacatctggatattttggatatgcggtaatagttcttggtattcttttgacacgaagtgcagacacaaggacaattaagagctatatttatattattttagtggttggatttgtagtgctattgggagattattccgtaagaggaaatgatagtttgatttacagggcattgttatcgaaagtgttttctagtcagggagacttttcattttccgcttcgacgggagtttatcgttatgaaatgattgggatggcattgttggctatggcaatgaatccatttggtatgggctatgaagcttgggcaaaattgtatcgtttgaactcattcgctgatgccggtggatatccgtttattattggagcggtaattggtattgtaccactttttgtatcattatggtggatatttagtccgcttaagtatatgaaaaataaatgggtagaaattgtagtatttttatttttatattttaatacagctatggcacaaacaagtgcattttatcctgcaataatttttttgcctgtatttcttgatattatgagacagaacattactgatctggagttggagaaagagtatgcttatgaactataa

SEQ ID NO: 68 - protein, 431 aa, Lactococcus lactis
  33139_wzy
MHLYVSKKAILQYLMLYVMLIFCQTHVYRLYIRSNLTIHVGLVILFLIIGVVNFRKKTKRPFLMCAFLLAMVIGVRFINGGVGIDFWAEMAAKILITYIAILIDPEQFLTRFVKIITFFAAISIVGWLQQIAGLNIMQKIGMVNNDFYTTVTWDKGYVEETQRKIYGLLFYVTTDVEIKRNMSIFTEPGIYQMVLNAAIFVVAFCNKLIELNPKEIKKYFLILTIALITTQSTSGYFGYAVIVLGILLTRSADTRTIKSYIYIILVVGFVVLLGDYSVRGNDSLIYRALLSKVFSSQGDFSFSASTGVYRYEMIGMALLAMAMNPFGMGYEAWAKLYRLNSFADAGGYPFIIGAVIGIVPLFVSLWWIFSPLKYMKNKWVEIVVFLFLYFNTAMAQTSAFYPAIIFLPVFLDIMRQNITDLELEKEYAYEL

SEQ ID NO: 69 - DNA, 1050 bp, Lactococcus lactis
  ORF coding a putative GT2 protein of DSM 33139
atgaaaatactatttcacataagttcactttttggtggtggagctgaaagagttatgtcctatttgattaatcacaattgtgaactaaataatgaagtttatattgtggtttgttatgagaaggaaggtgagtattatatttcacctaaagcaaaaaaaattgtaataggaacacatagcattgtttctcaatctctagaattaagaaagacaataaaaagaattaaaccagatatatgtgtaagttttatgcaaggaggaaatatcagactttctctagcttgcatgggtttaaaacaaaaatatattctgtcagtaagaaatgatcctaaaaaagaatatccaaatgcgattatgcaaaaattggtgcggtattggtttgatgcagctgacggagttgtgtttcaaacagaagatgcaaaaaagtttttctgcagtagcgtgcagaataaatcgagtataatatacaatcctgtatcaaaccagttttttatagagaatgtgtcaaaagatactactggaatagtagcgttcggtcgtctggttgatcagaaaaactttgcgatgttaataaaagcatatgccgtgatagcagatagaatcgatgatgatttatatatatacggcgaaggccccttagagaaaaggttatatgaaatcattaattcaaccggacttgcaagtcggattcacttaatgggccggactaataatgtgccagaagtacttaaaacagcaaaagtgtatgctttaagctcggattttgaaggtatgcctaatgcattgctggaagctgtatgtatgcttgtgccggtagtttctactgattgcccttgcggtgggccaaaagagatttgtaacaatgcgtgtggtctattgagcccagttggggatgtagaatcttttgcaaataatctttacaaagtttcccacagcgaacaattaagagaacaattagtcaaaaaatgtattgaacgaagagctgcgttttcaaatgattctatactgaaaaagtgggatgcattttttgataaagtgtgtggatgctaa

SEQ ID NO: 70 - protein, 349 aa, Lactococcus lactis
  33139_GT2
MKILFHISSLFGGGAERVMSYLINHNCELNNEVYIVVCYEKEGEYYISPKAKKIVIGTHSIVSQSLELRKTIKRIKPDICVSFMQGGNIRLSLACMGLKQKYILSVRNDPKKEYPNAIMQKLVRYWFDAADGVVFQTEDAKKFFCSSVQNKSSIIYNPVSNQFFIENVSKDTTGIVAFGRLVDQKNFAMLIKAYAVIADRIDDDLYIYGEGPLEKRLYEIINSTGLASRIHLMGRTNNVPEVLKTAKVYALSSDFEGMPNALLEAVCMLVPVVSTDCPCGGPKEICNNACGLLSPVGDVESFANNLYKVSHSEQLREQLVKKCIERRAAFSNDSILKKWDAFFDKVCGC

SEQ ID NO: 71 - DNA, 1179 bp, Lactococcus lactis
  ORF coding a putative GT3 protein of DSM 33139
atggagggaaaaatgagtaacaaaacgaaaatgttatttattatgaattctcttaattttggaggcgcagaaaaagcacttgtcaatttgtttgatactatgaattacgatgtctatgaaattgatttgcttttgctttcagatgaaggaaagttgcttagtatagtaaacaataaggtgaatataatacacccagatctaattacgcgtaacctttatggagaacattgtaactttatatttaaatttcctaagattatatttactggtagccaatatttgattacaaggaacagatcctatgtaaatcaattgaggtggaagaagttttataaaaaaataattccgcagttacaaactaaatacgatgtggctgtttcctttcttcagggagatccgttgtattatttagttgataaggtattcgcaaaaaaaaagattgcttgggtgcataatgactatcgtatgacccagtgcaatagtatatttgatttgaaatattttgaacaagtcaatcaagttgtaacaatttcaaatatttgtctagatatacttaaagaaatttttccatcggtaccatcaatgtttttgcctaacattgttaattccacatcaatcaattcatatgcagaaggacaaccaaatgaatatgatggagttaaatcaaaaaaattacttacgattggaaggttaaaccctcaaaaaggatatgattttcttttagaaattgcagcatatttgaaagaaataaaatatgattttaagtggtacattatcggagagggagaacttaaggaacaactattagcggagtggagagaaaaaaagctagaagattgtgtctattttattggtacaagagaaaatccatatccatatattaagcatgcagatgtagtagtacaaacaagtcgttacgaaggaaaatctatagtgttggatgaggccaaaattctcaataaacttattgtttgtaccaattatgatactgtgaaagatcagttaattgatggaaaagaggggattatctcttcttttgaagttaaagagtttgcggaaagtatcataggattattagcggatgataacaaaatgaatgagattgtcaattacttatcatcgcatgaatatggaaatgagaatatgatcaaattatatgatcagttatttcaggtataa

SEQ ID NO: 72 - protein, 392 aa, Lactococcus lactis
  33139_GT3
MEGKMSNKTKMLFIMNSLNFGGAEKALVNLFDTMNYDVYEIDLLLLSDEGKLLSIVNNKVNIIHPDLITRNLYGEHCNFIFKFPKIIFTGSQYLITRNRSYVNQLRWKKFYKKIIPQLQTKYDVAVSFLQGDPLYYLVDKVFAKKKIAWVHNDYRMTQCNSIFDLKYFEQVNQVVTISNICLDILKEIFPSVPSMFLPNIVNSTSINSYAEGQPNEYDGVKSKKLLTIGRLNPQKGYDFLLEIAAYLKEIKYDFKWYIIGEGELKEQLLAEWREKKLEDCVYFIGTRENPYPYIKHADVVVQTSRYEGKSIVLDEAKILNKLIVCTNYDTVKDQLIDGKEGIISSFEVKEFAESIIGLLADDNKMNEIVNYLSSHEYGNENMIKLYDQLFQV

SEQ ID NO: 73 - DNA, 1446 bp, Lactococcus lactis
  ORF of a putative wzx gene of DSM 33139
ttggagaataaaatggtaaagaaaaaactacaaaatattcctttgggagtaaaatcagcagtggtatataccatggcgtctgttttttcaagaggattatcaatgattacagttccaattttcacgagaataatgtctacaagtgaaattggaatggttaatctatataattcctggtatttattattgaatgtaattgcaactctatcattaacatcaggtggatttcaggtagcaatgaaagactttgagggggaaagggatcaatatcaatcgtctgttttgacattaacgtcaatgatggccatttttctaggctgtatttattttctcatacctaatagttggaataggattacagggctaccttctgctttgatgattttaatgcttgtagtgtttttctttgcacaggcgcaggatttttggctattgagacaaagatatgaatataaatataaattagctggtgcattgacaatggggtcagctttagcatcaacagtattgtctgttatagttgttttaagcttaaataaagcaaattcagatcaaattgtagtggggcgcttatatgcaactaacattgtatctatagctatttcagcaattttatggattaaattatatgtaaaaggaaaaacgatagtaaatataaagtactggaaatactctttgaaattgagtgtgcctcttattggttatgcttttgcggcacagattttaagtgtttcagatcgaatgatgataagcaaaatggttggaaatgatgcagttggaatatatagtactttatatactgtaagttcaatttcactgttagtttggactgcaattaattcatcgtttataccgtatttatatcaaaatatagagaaaaaaggaaatagaataaaagaattatcattagctttaatgggttcgtatgctattatagctgttatgcttacttttcttgcaccagaaatagttaaaatattagctactaaggaatattatgaagcaatttatattatgccacctattgcagcaggtgtgtttttgacttctgtgtcaaatatgtattctaatttgctcatataccataagaaaactaattatattatgtattcttcgattatcgcagctactgtaaatcttatactcaactatatatgtataaatgcatttggctatatggcagcagcatatactacactgatagcatacatagttttggcgggaacacaagcaatgtttgcgagaaagattcgctttaaagagactggggaaaaatctgtatataatgataatgcggtatttgttatggcgatattaacgataatagtagccttattcggcttggtattgtatcgctatacttggttaagatatataatcatttgtactggaatgattgcaggaataaaaatcgcgttcatgactttgaaaagaattaaaagttaa

SEQ ID NO: 74 - protein, 481 aa, Lactococcus lactis
  33139_wzx
LENKMVKKKLQNIPLGVKSAVVYTMASVFSRGLSMITVPIFTRIMSTSEIGMVNLYNSWYLLLNVIATLSLTSGGFQVAMKDFEGERDQYQSSVLTLTSMMAIFLGCIYFLIPNSWNRITGLPSALMILMLVVFFFAQAQDFWLLRQRYEYKYKLAGALTMGSALASTVLSVIVVLSLNKANSDQIVVGRLYATNIVSIAISAILWIKLYVKGKTIVNIKYWKYSLKLSVPLIGYAFAAQILSVSDRMMISKMVGNDAVGIYSTLYTVSSISLLVWTAINSSFIPYLYQNIEKKGNRIKELSLALMGSYAIIAVMLTFLAPEIVKILATKEYYEAIYIMPPIAAGVFLTSVSNMYSNLLIYHKKTNYIMYSSIIAATVNLILNYICINAFGYMAAAYTTLIAYIVLAGTQAMFARKIRFKETGEKSVYNDNAVFVMAILTIIVALFGLVLYRYTWLRYIIICTGMIAGIKIAFMTLKRIKS

SEQ ID NO: 75 - DNA, 912 bp, Lactococcus lactis
  ORF of the epsL gene of DSM 33139
ttggagggaaacttggaacgcaaaaagaaaaaaaagaatatttgggtgataattatatctatcttaatttttattgcccttataggagcaggggcttattccttaagaaatttacttattcctactaatcatccgaggacaaacagttcggatcaacctaaaaaaacttcggtctctaacggttatgtagagcaaaaaggtgaagaagctgccgtaggtagtacagcacttgtagatgatactggtataccagaatgggttaaagttccctcaaaggtaaatctagataaatttactgatttatctacgaataatatcactatttatcgaattaacaatccggaagtcttaaaaacagttaccaatcgtacagatcaacggatgaaaatgtcagaagttatagctaagtatcctaatgctttgattatgaatgcttccgcatttgatatgcagacaggacaagtagctggatttcaaattaataatgaaaagttgattcaagactggagtccaggtacaacgactcaatatgcttttgttattaataaagatggttcgtgcaaaatttatgattcaagtacacctgcttcaactattattaaaaacggagggcaacaagcctatgattttggtactgcgattatccgtgatggtaaaattcaaccaagtgatggctcagtagattggaagattcatatttttattgcgaatgataaagataataatctctatgctattttgagtgatacaaatgcaggttatgataatataatgaaatcagtgtcaaatttgaagctccaaaatatgttattgcttgatagtggtggctcaagtcaactatctgtcaatggtaaaacgattgttgctagtcaagatgatcgagccgtaccggattatattgtgatgaaataa

SEQ ID NO: 76 - protein, 303 aa, Lactococcus lactis
  33139_epsL
LEGNLERKKKKKNIWVIIISILIFIALIGAGAYSLRNLLIPTNHPRTNSSDQPKKTSVSNGYVEQKGEEAAVGSTALVDDTGIPEWVKVPSKVNLDKFTDLSTNNITIYRINNPEVLKTVTNRTDQRMKMSEVIAKYPNALIMNASAFDMQTGQVAGFQINNEKLIQDWSPGTTTQYAFVINKDGSCKIYDSSTPASTIIKNGGQQAYDFGTAIIRDGKIQPSDGSVDWKIHIFIANDKDNNLYAILSDTNAGYDNIMKSVSNLKLQNMLLLDSGGSSQLSVNGKTIVASQDDRAVPDYIVMK

SEQ ID NO: 77 - DNA, 903 bp, Lactococcus lactis
  ORF coding a putative LytR family transcriptional regulator protein of DSM 33139
atgactcaaaaaaagaggcgttattatcgtaagaaaaaacacacagtactaaaagttgtttcaattatttttgcatttgtaattatcgctattgcttctatagcctacgcagcttatagaaatgttgaatcaacattttcaacatcatatgaaaatttccctaaaacaacaagtatcgacttaaaaaagtctaaaacattcaccacacttatcattgcaactggtaaaaataattctaaaaatacagcttatgctactgttttagcttcaacgaatgtaaagacaaatcaaactactttcatgaacttcccagtttttgcgacaatgcctaatcaaaaaacaatcactgaagtttacaatacgaatggagatgatggaattttccagatggttaaagacctattgaatgtgtccattaacaaagtaattcagattgatgttaataaaatgggatcacttgtacaggccactggtggaatcaccatgcaaaatccaaaggcattcaatgctgaaggttatgagtttaaacaaggaactgttaatttacaaactgctgatcaagtccaagcctatatgacacaaattgacgatactgatttggatgcttcaatcactcggattcaaaatgtctcaatggaactctacggaaatattcaaaaaatggctcatatgaaaaaacttgaaagtttcaattactatcgagaaattctctatgctttttcaaacactgttaaaaccaatataagtttcgatgatgctaaaactatcgttatgagctacaataaggctctaaagaataccagcaagctcaatctacatacaacagatgaaaatggagctaaagtagtttctcaaacagaattagactcagtcaaaactctttttgaaaaatctctaaaataa

SEQ ID NO: 78 - protein, 300 aa, Lactococcus lactis
  33139_lytR
MTQKKRRYYRKKKHTVLKVVSIIFAFVIIAIASIAYAAYRNVESTFSTSYENFPKTTSIDLKKSKTFTTLIIATGKNNSKNTAYATVLASTNVKTNQTTFMNFPVFATMPNQKTITEVYNTNGDDGIFQMVKDLLNVSINKVIQIDVNKMGSLVQATGGITMQNPKAFNAEGYEFKQGTVNLQTADQVQAYMTQIDDTDLDASITRIQNVSMELYGNIQKMAHMKKLESFNYYREILYAFSNTVKTNISFDDAKTIVMSYNKALKNTSKLNLHTTDENGAKVVSQTELDSVKTLFEKSLK

SEQ ID NO: 79 - DNA, 1251 bp, Lactococcus lactis
  ORF coding a putative nucleotide sugar dehydrogenase protein of DSM 33139
atgagagagtttaaagatttaaagattgctgttgccggaacgggatatgttggtctttctattgctacgctgttatctcagcaccacaaggtgactgctgtggatatcattcctgagaaagttgaacttatcaataataagaaatctccgattcaggatgaatatattgaaaagtatctggcagagaaagagctggatctgactgcgactctggatgctaaggaagcatacagtgatgctgattttgtagtgatcgcagctcctacaaattacgatagcaagaagaacttttttgacacgagtgcggtagaagccgtcattaaactggtcatcgagtacaacccggaagctatcatggttatcaagagcactattccggttggttatacagcaagcgttcgtgagaagttccactgtgacaatattatctttagcccggagtttttgcgcgagagcaaagctctgtatgataacctttatccttcccgtatcattgtcggtacggatgttgacaatgttcgactggtaaaggcggcacacacttttgcagagctcctgcaggaaggtgctattaaggaaaatatcgatactctgtttatgggctttaccgaggcagaggcagttaagctattcgctaacacttatttggcactgcgtgtcagctacttcaatgaactggacacttacgcagagatgaagggactgaacactcagcagatcattaatggtgtttgcctcgaccctcgtatcggcactcattataacaatcctagctttggttacggcggatactgcctgccgaaagacaccaagcagctgctggcaaattatgcagatgtgccggaaaacctgattgaggctatcgttgaaagtaatagaacaagaaaagacttcatcgctgaccgtgttctggagattgcaggtgcttatgaagcaaatgacagctgggatgagagcaaagaaaaagaagttgttgtcggcgtttaccgtctaacaatgaagagtaacagcgataacttccgccagagttccattcagggtgttatgaagcgtattaaggccaagggtgcaacagtcatcatctatgagccgaccctgaaggacggcgatactttctttggtagtcgagttgttaataatttagagaagttcaaaaaacagagccaggcaattattgcgaaccgttacgacaagagcttggatgatgtgaaggataaggtttatacacgcgatatttttcaacgggactaa

SEQ ID NO: 80 - protein, 416 aa, Lactococcus lactis
  33139_nucleotide_sugar_dehydrogenase
MREFKDLKIAVAGTGYVGLSIATLLSQHHKVTAVDIIPEKVELINNKKSPIQDEYIEKYLAEKELDLTATLDAKEAYSDADFVVIAAPTNYDSKKNFFDTSAVEAVIKLVIEYNPEAIMVIKSTIPVGYTASVREKFHCDNIIFSPEFLRESKALYDNLYPSRIIVGTDVDNVRLVKAAHTFAELLQEGAIKENIDTLFMGFTEAEAVKLFANTYLALRVSYFNELDTYAEMKGLNTQQIINGVCLDPRIGTHYNNPSFGYGGYCLPKDTKQLLANYADVPENLIEAIVESNRTRKDFIADRVLEIAGAYEANDSWDESKEKEVVVGVYRLTMKSNSDNFRQSSIQGVMKRIKAKGATVIIYEPTLKDGDTFFGSRVVNNLEKFKKQSQAIIANRYDKSLDDVKDKVYTRDIFQRD

SEQ ID NO: 81 - DNA, 780 bp, Lactococcus lactis
  ORF of the epsC gene of DSM 33139
atgcaggaaacacaggaacaaacgattgatttaagagggatttttaaaattattcgcaaaaggttaggtttaatattatttagtgctttaatagtcacaatattagggagcatctacacattttttatagcctccccagtttacacagcctcaactcaacttgtcgttaaactaccaaatttggataattcagcagcctacgctggacaagtgaccgggaatattcaaatggcgaacacaattaaccaagttattgttagtccagtcattttagataaagttcaaagtaatttaaatctatctgatgactctttccaaaaacaagttacagcagcaaatcaaacaaattcacaagtcattacgcttactgttaaatattctaatccttacgttgctcaaaagattgcagacgagactgctaaaatttttagttcagaagcagcaaaactattgaatgttactaacgttaatattctatccaaagcaaaagctcaaacaacacccattagtcctaaacctaaattgtatttagcaatatctgttatagccggattagttttaggtttagccattgctttattgaaggaattgtttgataacaaaattaataaagaagaagatattgaagctctgggactcacggttcttggtgtaacaacctatgctcaaatgagtgattttaataataatacgaataaaaatggcacgcaatcgggaactaagtcaagtccgcctagcgaccatgaagtaaatagatcatcaaaaaggaataaaagatag

SEQ ID NO: 82 - protein, 259 aa, Lactococcus lactis
  33139_epsC
MQETQEQTIDLRGIFKIIRKRLGLILFSALIVTILGSIYTFFIASPVYTASTQLVVKLPNLDNSAAYAGQVTGNIQMANTINQVIVSPVILDKVQSNLNLSDDSFQKQVTAANQTNSQVITLTVKYSNPYVAQKIADETAKIFSSEAAKLLNVTNVNILSKAKAQTTPISPKPKLYLAISVIAGLVLGLAIALLKELFDNKINKEEDIEALGLTVLGVTTYAQMSDFNNNTNKNGTQSGTKSSPPSDHEVNRSSKRNKR

SEQ ID NO: 83 - DNA, 687 bp, Lactococcus lactis
  ORF of the epsE gene of DSM 33139
atggaattttttgaggatgcctcatcacctgaatcggaagagcctaagttagtagaattaaaaaatttttcttatagagagctaattataaaaagagcaattgatatcctaggaggattagcaggttcagttttatttcttatcgcggctgcattgctttatgtcccttacaaaatgagctcaaaaaaagatcaagggccaatgttctataaacaaaaacgctatggtaaaaatggtaaaattttttatattttgaaatttagaacaatgattcttaatgccgagcagtatctagaacttaatccagatgttaaagctgcttaccatgccaacggcaataagctagaaaacgatccacgggtaacgaagattggctcatttataagacgacactcaattgatgaactgccacaatttatcaatgttcttaaaggggatatggcattagttggtccaagaccaattttgctttttgaagcgaaagaatatgggaaacgcctcgcttacttactcatgtgcaaaccaggaatcactggttattggacgacacatggtcgaagtaaagttctttttcctcaacgagcagatttagaactctattatctccagtaccatagcaccaaaaatgatatcaagcttctagtactcacaattgcacaaagtattcacggatcggacgcttactaa

SEQ ID NO: 84 - protein, 228 aa, Lactococcus lactis
  33139_epsE
MEFFEDASSPESEEPKLVELKNFSYRELIIKRAIDILGGLAGSVLFLIAAALLYVPYKMSSKKDQGPMFYKQKRYGKNGKIFYILKFRTMILNAEQYLELNPDVKAAYHANGNKLENDPRVTKIGSFIRRHSIDELPQFINVLKGDMALVGPRPILLFEAKEYGKRLAYLLMCKPGITGYWTTHGRSKVLFPQRADLELYYLQYHSTKNDIKLLVLTIAQSIHGSDAY

SEQ ID NO: 85 - DNA, 312 bp, Lactococcus lactis
  ORF coding a putative GT4 protein of DSM 33139
atggaaaaggaattaatatctattattacacctacatataacagagaaaagacactcattcgagtttacgattctttatgtaaacagagttataaatgcattgaatggattgttgtagatgatggctctagagacaaaactaaagaattgatttcgtcattgataaatcagaaaaataagccttttcctatcaaatatgtataccaaaaaaattctgggaaacacgtggcagtaaataaaggcttagaaattgcaggggggggtacgttggaatcttggactccgatgatgccttgtttgatgatgctttag

SEQ ID NO: 86 - protein, 103 aa, Lactococcus lactis
  33139_GT4
MEKELISIITPTYNREKTLIRVYDSLCKQSYKCIEWIVVDDGSRDKTKELISSLINQKNKPFPIKYVYQKNSGKHVAVNKGLEIAGGGTLESWTPMMPCLMML

SEQ ID NO: 87 - DNA, 630 bp, Lactococcus lactis
  ORF coding a putative GT5 protein of DSM 33139
ttggactccgatgatgccttgtttgatgatgctttagagacattaatggggtactggaatgcaatgacaccccaggagaaaaaagaatttaaatcagttacaggacgcgtggcaaatgcagagacaggagaattgattggccctaaaaataagcttaaactgattgattgctcttctcttgaagccagatttgtgagaaaaatgggatacgaaaagtggggattatcaagaacggaagttatgcgcgaatttcaaagtccaaatatagaaggactccatttttatcctgagaatattacatatgacgcaattggtagaaaatataaagagcgttttgttgaggatgtggttagaaaatattatctaaattcatcggattcaattataaagaataaaaagggccgtagtaaagaaaattattatttatggctacataatattaatgatgtattcgattattttttatacaatcctaaaatctttctcaaatcatttgtcgggctggcaagagatggggttctttcaggaagaagtataccatatatcataaatcagataaataccttgccgaaacgagtcttgtttgttctatttatgcccgtaggaatgcttcttgcttataaaagataa

SEQ ID NO: 88 - protein, 209 aa, Lactococcus lactis
  33139_GT5
LDSDDALFDDALETLMGYWNAMTPQEKKEFKSVTGRVANAETGELIGPKNKLKLIDCSSLEARFVRKMGYEKWGLSRTEVMREFQSPNIEGLHFYPENITYDAIGRKYKERFVEDVVRKYYLNSSDSIIKNKKGRSKENYYLWLHNINDVFDYFLYNPKIFLKSFVGLARDGVLSGRSIPYIINQINTLPKRVLFVLFMPVGMLLAYKR

SEQ ID NO: 89 - DNA, 1098 bp, Lactococcus lactis
  ORF coding a putative GT6 protein of DSM 33139
gtgagcaaatatgtcaaattagaattaaattacccagtagagcatgggagaaaggaaaaatccaatcatttcctaaatgtgattggattatatgagaatttaatgaaaaagaacactatattagttgattttgatgttcctgatgattgggaatataaacgtggcattgaggatgtaacaggagaaaaatgggaactgtggaaatgtatcacacatcggcttcaaagttctaagattaaggttctgttgcgctatattataacattcttgttcgcgtttaaagtgtttttgcacagaaaaaaatataaaagaataattgcatggcaacagttttatgggttggctttagcttttttttgtaagttgtttaatgtgaaggattatccggaaatatatataatgacatttatatataaaaataataaaagtagagtgtttagtaaatttgtgaaatatgcggtagattctagatacataaagaaattgatggtaatgtcggatggcgaaaaacagttttattctaaagaactgaagttagatgagtctttgttctattgcactagagttggcgttaaagatgaaactaattctattaagcaaaatattacggaaaaatactatttagcagtaggtagaagcaatagagattataaatttttgagagatgcgtggaaaaatgaatatggaaagttaataatagtcaatgattcatataaagagccggaaaaagatggtattgtatgtttaaaaaaatgttatggtcgagactatttacaaatggttgctaattgttatgctgaggttatacctttgaatgataaaaatatatcatctggagctttgagctttttgcaagcaatgatgttttctaagccggttattgtaacaaataatatgacagtaagggattatattaaaagtggatataatggggttatcattgagaacacttcagaagaattggaaggtgcaattaaccaattagagaatccgataatatatcaagaaattgcatcaaacgctcgaaaagaatatgaagagaaatatagtgaattaattttgggcaaggatattggtagtatgattgttcatcgataa

SEQ ID NO: 90 - protein, 365 aa, Lactococcus lactis
  33139_GT6
VSKYVKLELNYPVEHGRKEKSNHFLNVIGLYENLMKKNTILVDFDVPDDWEYKRGIEDVTGEKWELWKCITHRLQSSKIKVLLRYIITFLFAFKVFLHRKKYKRIIAWQQFYGLALAFFCKLFNVKDYPEIYIMTFIYKNNKSRVFSKFVKYAVDSRYIKKLMVMSDGEKQFYSKELKLDESLFYCTRVGVKDETNSIKQNITEKYYLAVGRSNRDYKFLRDAWKNEYGKLIIVNDSYKEPEKDGIVCLKKCYGRDYLQMVANCYAEVIPLNDKNISSGALSFLQAMMFSKPVIVTNNMTVRDYIKSGYNGVIIENTSEELEGAINQLENPIIYQEIASNARKEYEEKYSELILGKDIGSMIVHR

SEQ ID NO: 91 - DNA, 18254 bp, Lactococcus lactis
  DSM 33134 eps gene cluster, complete sequence
atggatgatttattttaccatcgtctaaaggaactagttgaatcaagtggtaaatctgcaaatcaaatagaaagggaattgggttaccctagaaattctttgaataattataagttgggaggagaaccctctgggacaagattaataggactatcagagtattttaatgtgtctccaaaatatctgatgggtataattgatgagcctaatgacagttctgcaattaatctttttaaaactctaactcaagaagagaaaaaagaaatgtttataatttgtcaaaaatggctttttttagaatatcaaatagagttataacaataataaatttagggagtttttcttattaatatgatgaaaaaaggaatttttgtaattactatagtgatatctatagcatttataattggaggtttttatagttataattctaggataaataatctttcaaaagctgataaaggaaaagaagttgtaaaaaatagcagtgaaaaaaatcagatagaccttacctataaaaagtattataaaaatttaccaaaatcagttcaaaataaaatagatgatatttcatccaaaaataaagaagttactttaacttgtatttggcaatctgattcagttatttctgaacaatttcaacaaaacttacaaaaatattatggaaataagttttggaacatcaaaaatatcacttacaatggcgaaactagtgaacaattattggctgaaaaagttgaaaaccaagtattagccactaatcctgatgttgttttatatgaagctccactttttaatgataaccaaaacattgaagcaacagcctcactgactagtaatgagcaacttataacaaatttggctagtgcaggagcggaggtaatagttcaaccctctccaccgatctatggtggtgttgtgtaccccgtacaagaagaacaatttaaacaatctttatctacaaagtatccctatatagactactgggctagttacccagacaaaaattctgatgaaatgaaggggctgttttctgatgatggagtatatagaacattaaatgcttcggggaataaggtttggctagattatattactaaatattttacagcaaactaattaagttataaataacaattattaaatattggagaagaaatgcaggaaacacaggaacaaacgattgatttaagagggatttttaaaattattcgcaaaaggttaggtttaatattatttagtgctttaatagtcacaatattagggagcatctacacattttttatagcctccccagtttacacagcctcaactcaacttgtcgttaaactaccaaatttggataattcagcagcctacgctggacaagtgaccgggaatattcaaatggcgaacacaattaaccaagttattgttagtccagtcattttagataaagttcaaagtaatttaaatctatctgatgactctttccaaaaacaagttacagcagcaaatcaaacaaattcacaagtcattacgcttactgttaaatattctaatccttacgttgctcaaaagattgcagacgagactgctaaaatatttagttcagatgcagcaaaactattgaatgttactaacgttaatattctatccaaagcaaaagctcaaacaacacccattagtcctaaacctaaattgtatttagcaatatctgttatagccggattagttttaggtttagccattgctttattgaaggaattgtttgataacaaaattaataaagaagaagatattgaagctctgggactcacggttcttggtgtaacaacctgtgctcaaatgagtgattttaataataatacgaataaaaatggcacgcaatcgggaactaagtcaagtccgcctagcgaccatgaagtaaatagatcatcaaaaaggaataaaagataggagttcaggatggctaaaaataaaagaagcatagacaataatcgttatattattaccagtgtcaatcctcaatcacctatttccgaacaatatcgtacgattcgtacgaccattgattttaaaatggcggatcaagggattaaaagttttctagtaacatcttcagaagcagctgaaggtaaatcaaacgagagtgctaatctagctgttgcttttgcacaacaaggtaaaaaagtacttttaattgatggcgatcttcgtaaaccgactgttaacattacttttaaagtacaaaatagagtaggattaaccaatattttaatgcatcaatcttcgattgaagatgccatacaagggacaagactttctgaaaatcttacaataattacctctggtccaattccacctaatccatcggaattattagcatctagtgcaatgaagaagttgattgactctgtgtccgattcctttgatgttgttttgattgatactccacctctctatgcagttactgatgctcaaattttgagtgtttatgtaggaggagtggttcttgttgtacgtgcctatgaaacaaaaaaagagagtttagcaaaaacaaaaaaaatactggaacaagttaatgcaaatatattaggagttgttttgcatggggtagactcttctgagtcaccgtcgtattactactacggagtagagtaattggaataaatgttaatcaaataaaagacagaaatttgtagaagaggggagcaaatgattgatattcattgccatattttaccggggatagatgatggagctaaaacttctggagatactctgacaatgctgaaatcagcaattgatgaagggataacaaccatcactgccactcctcatcataatcctcaatttaataatgaatcaccgcttattttgaagaaagttaaggaagttcaaaatatcattgacgagcatcaattaccaattgaagttttacccggacaagaggtgagaatatatggtgatttattaaaagaattttctgaaggaaagttactgacagcagcgggcacttcaagttatatattgattgaatttccatcaaatcatgtgccagcttatgctaaagaacttttttataatattcaattggagggacttcaacctattttggtccaccctgagcgtaatagtggaatcattgagaaccctgatatattatttgattttattgaacaaggagtactaagtcagataacagcttcaagtgtcactggtcattttggtaaaaaaatacaaaagctgtcatttaaaatgatagaaaaccatctgacgcattttgttgcatcagatgcgcataatgtgacgtcacgtgcatttaagatgagggaagcatttgaaatgattgaagatagttatggttctggtgtatcacgaatgtttcaaaataatgcagagtcagtgattttaaacgaaagtttttatcaagaaaaaccaacaaagatcaaaacaaagaaatttttaggattattttaaagggattaaatggagtaaataatgaaagtttttgaggatgccgcatcacctgaatcggaagagcataagttagtagaattaaaaaaattttcttatagagagctaattataaaaagagcaattgatatcctaggaggattagcaggttcagttttatttcttattgcggctgcattactttatctcccttacaaaatgagctcaaaaaaggatcaagggccaatgttctataaacaaaaacgctatggaaaaaacgggaaaattttttatattttgaaatttaggacaatgatagttaatgctgagcagtatttagagctacatccagaagttaaagccgcctatcatgccaatggcaataaactagaaaatgacccccgtgtgacgaagattggttcatttattagacaacactcaattgatgaattaccacaatttatcaatgttcttaaaggggatatggcattggttggcccaagaccaattttgctttttgaagcgaaagaatatggggagcgcctctcttacttactcatgtgtaaacctggaattactggttattggacaacacatggtcgaagtaaagttttttttcctcaacgagcagatttagaactctattacctccagtaccatagcaccaaaaacgatatcaagcttctagtactcacaattgtacaaagtattaacggatcggacgcatattaaaaaatgaaaatagcattagtaggttccagcggtggccatttgacacacctgtatttgttaaaaagtttggtaaacatgttattgcaggatttaaacctacagcatatgcaaaattgagcaaaaaaaatggctgaaaaagttgaaactttagtcctttcagtttttaatattttcgagtttctttcagatgaacattatatttgaaagaaaaaacaaattgatttaaaaatatagtgtaaattatacaatagtagttagtttgagtatttaatcattgcattgtatactgcaatgattttttaaggagaagtgaagtttatgaaaaaagaaaaaatttcaattattacacctgtatataattgtgaaaaacttattgaaaaaaccattgaatgtgttttgaatcaaacatataaaaattgggagtggctacttgttgatgattgttcaccagacaactctgccataataataaaaaagtatgctaaaaatgataatagaattaaatattttaaattaagtgaaaatagtggtgctgccgtttctagaaataaagcattggcagaatctactggtagatttgtagcttatttggatgcggatgatttatggaaaaatgataaattggagaaacaagtaaaatttatgttagaaaatcaatattcatttacttgtacggactatgaaaaaattacggaaacaggtaatagtttaaataaaattattaaaataccaaaaaaagtagattataatttctttttaagaaatacaataattcaaactgttggagtgatggtagatacaaaattaacagggaaagaattattgaagatgcctaatattagacgaagacaagatgctgcaacatggtgtcaacttttaaaaaatggacacgattgttatgagtgtccagagaatttgtcttattatagagtagtaacaaattctttatcaagtaataaatttaaagcaataaaaatgaattggtactggtatagaaagatagaaaaattacctttatggaaagcatgttattgctttattggatatgcttttaatggtgtaagaaaaagaatatatataaaaaggtaagtgaaaagtatttgactttttcatacttgtttgtaccttaaacaaacgcaacgaagtgcaaaggaatgataaaagaatgaaaaaaattttatatatagctacaactgccgatagtagaaatagattagatggtgaaacaattaaatgtagattattaagagaatatctaagaggaatagaaaatgttgaacttatttctgtagatactgataattggaaaaagcataaattaaaattagtatttttaataatatataattttattttttgtaattctatcgttgtttcatctgcggataaaggtgctaatattgtcttagatttttttagaaaaattaatactaaaaaaaatatttattattttgtaattggtggtacattatataaaaatataaaagaaaaaaattggaatattgaaacatataaaagattaaaacatatttacgttgaggcaaatcaactgaaattagatttgaactctttaaatattactaatgttgatatcttaaataattttagaaaagtaaataaatttgaaaataaatataaaaagagtaaagaaataaaatttgtttactttggaagagttataagagaaaaaggtgtagaggaagcaataaaaatgattaacaggcttaatgctgaaaatattatatgtacatttgatatatatgggcaatgtaaagatgaatatttgcaacaaatacaagaaaagtttaatgaaaacataagatttcatggtgaaataaaaccaaatggtaaaaaagaatatgaaatattatcacaatatgatgtttttctgttcccaactgagtacccaggagaatgccttccaggagctttgattgattgctatatttctggacttgcagtaattgcttcaaattggaaatatgcaaaggaatatattttagataatgaaaatggaaaaatctttgaatacaaagactataatgatatgtataaaaaaacaaaagaaatggtagctgaaaatgttattcaaaaatataaattaaaatcagtagaattatcaaaaaaatataatatggatgtattattaaatgactttaaaaaagaaataatggaggaaaaaaatgaaactttttaaacttttaaagagatggtttaatatggtaacaggtaaaagttctttccatgtaaaacaaggagaaggaaagtatttttcaaaatatgaaattaaaggatattacaatgatttgacaaacaaggtttcgaataagactgtaatagattcaaatggaattccaataaatacaacaattgcaaatttagaaacgtattttccaatatccatatttcaatatggcttaggattatacgatttatatatagaaacaggagaaaaagattatttaaataaatttttaagaattgctgaatgggctatagaaaatataagtgatactggaatgtgggattgcatgggtaaattaaatgattctgcacatttgacacaatcatcaatgtgtcaaagcgaaggagtatctgtccttttgagagcatataaagaaacaaaaaatgaaaaatattatcaaaatgcgaagttggctattgattttatgttgaaaaaagtagaagatggtggaacagcattatacattaatgatgaaataatatttcaagaatatgtttccaaatataatttatcagttttaaatggttggattttttcaatatttggattgtatgattttacattagttaataaagaaaaaaagtatattgacattttaaatgatacaatagaaacaatgtgtttagaattaaaaaaatatgatagaaaattttggtctaattatgatttaatgcatacaatagctagtcctgcctatcatgatttacatattatgcaattaagaattctctataaattatttaataaaaaagaatttatgatttatgctgataaatgggaaaaatatcaaaaaaataaaatatatagggcattggcaatgattataaaattaaaacagaaaattttaaaaaataaatattatgatataaatacaagtttagtaaagtgaggagtttaaattgaaaaatataggaatagttctcgtaacatataatagattggagaaattaaaaattgcattatcatgttacgaaaaacaaaaaacaaaaattgatactatgataattgttaataattgcagtacagatgggacatttgaatttttagaagaatatagtaaaaggaagttaaaatataaaattgtaattttaaatatgccaaaaaatcttggtggtgcaggaggtttctttgaaggaatgaaatgtgcaatgaaagaagatttagagtgggtttatatttcagatgatgatgcttatccaaatgacaatactatatatgagcttgaaaaaatttactcaaaattacaaaataaagatgaaattgttgcattgtgcagtgttgttgaaaataaaaatggtttagattatgggcatagattaagaataatgaaaaatctcttttttgtgaagtggaaaccagtagataggagtgaatataataaagattattttaatgttgacattctatcgtatgtaggatcacttattaatgttaatgcattatattgtgcaggtttagacagaaaagatttctttatatatcatgatgatcaagaacattcattgagattaggcaaaaatggaaaaatattaacttgcactaaaagtgtaatacatcatgataccgaagtaaaaaaatacaaggaattattttggggaaattactatgatactcgaaataggcttttaatgataaaatataattttcctttaagatatttctatataagatactatttaggatatataagggattgtttattatgcaaaaacaaaataaaaaaagaaatgttaaaagttgcatatatggatgctaaaaataataaattagggttgaattcaatatataaacctggttgggtagctaaaaataaataatgtattctttttgaaaggaattaataaaatgataaaaagaaatcaattaaatttatttttgcagtatatacttgcttttctaattattttagaaactagaagtgtatattctcgttgtgttgttggtcatatagatgaaataataataggtggtataatattaacaataattttaattattttagttaacatgaattataaattaaaaactaaatcattgttttttttacttttttattatctatatatgtttatatttttaattataaatgttgatggatataatgtaaactttgttataatatttatgattttatttccacttgtatttttaatgctcaatttatatgatagtaaagaaataaaaaatctgtttaaagcatatgtaaatattatggttatcatttctgcaatatccttatttttttacatattcggatccttaactggtatggtttctactaatattatacaagaaataaattggggtggagattatggaggtaataaaataataaatggatattttggattgcattttaatacacaaacaactgtaatatttggtgatgccattttaagaaatacaagtatatttgttgaaggaccgatgtttgcattacatctcttatttgcaatggcattatcactatttatgaataaaaaattaataaataaatattcaataatatttggcttttcaatattatcatcgctatctataactgctatattattttatatgtttttattgttttacaagtatacattttataataaaagcaaaacgaagattattttgttgccaatattgtttttcatatttttaatcataggaactactttttttaatgataagcaatcaacaaattcctataatataagaaatgacgattatacagcaagttttagagtatttaatgattatccaatttttggaagtggatttgctaataataacatagtaattaaatatatgtcaacatttagattgtataatacaggtttagctaactcatttgtagtcttattagtccaaggaggattatatttagtaattttttatttactgccagttattttgaacagtttaaatttaattaaatccaaaaataaaaatttgtttttgatagaaattatgcttttacaactttatttattttttatgaatgcttatcaatatacatcattgatgataatctttctagcatttgattattatattttattattttataacaaaaataatgatttaaaaaatttgcaacttaaggaggaaacatatgaaaaaatatgattatttaatagtgggctctggattatttggagcaacatttgcaaatcttgctaaaaaagaaggaaaaaaagttctagttatagagaaaagaacaaatatagcaggaaatatatatacagaggaaatagagggaatacaagtacataaatatggagctcatatatttcatacagattataaagacgtatgggaatatgttaattcatttgtagaatttaatagatatacacccgaattgctagttgattatttagccatgacttgatacccgatagaatatcttaaagtctctggttccagtgatttagctgattttaacagtaaagaatacgctaaaagtatcatctctaatttcaattgaaaaccttgaggcgaacgacttttacaacgctcagctcctagatttgtcaaaaaagagaaaactcgctcaatcacttttctacgttttgaaaaattagggaaaaggattttcttttgcttcatgttcttcctgacaggtgtaattagatcaattccttttaattccagtctatcgtgcagtgactgacctagatatcccatatctccaaggactgttggtgtcccaaattgactcaacactccctcggtcattgaactatctgccattgaagcaggagtaattgtgtagtctatgacatagcctgattcactgactaaagcatgacatttacatccatagaagtactgtccctttgtagcattgtagccaacatttgcataatctccaagaactttgcttctgaaattacgaatcggctgacacaaaggaatggggaagctgtcaataatggatacactcattccttcaacctctttaaagacgagtgcttggcgaatgacttggatactcggtaagagggcattacaacggcggacaaagcgagaatattctaggaaattaggaaataaactttgagccaattggtgcttagctttaagcgtttcactaaaatgcagtacgccccataggtaacaagcgataactaagcaatctgatgttgcgagatggacgttctttcggttttgaacctcaaggggaacactcgtttgataaagcgtctcaatggttgtcagtaaataaacaaaaccttttggaagtgtgctattataagtcatataagtcatgcgctttctattgcttagtggtttaagattaggatagcacgacttatttattttccaatgaattaactagcaattcgggtatattatctatttttgtacaagtaggaatttcaggaattacttattttgtaatgttaattatattaaaagataaaatgaaatttgaaggaatagaaattataaaaaataaattataaaaaagaaaaattaatgtttaatgaaagaaggatcataatgaaaatagcagtagcaggaacaggttatgtaggtttatctctagccacattactaagccaaaaaaatgaggtagttgcacttgatgtaataccagaaaaagtagagaagataaataatagaataagtccaattcaagatgaatacatagaaaaatatttcaaagaaaaagaacttaatttaaaagcaactttagattataaagaagcatttgagaatgcagaatttattataataagtacgccaacaaattatgattcagaaaaaaattattttgacacatcatctgttgaagatataattcagaaagtaaaaagtatgaatatagatacaacaatggttgttaaatcaactattcctgttggatttataaaggcaatgaaagaaagatatcaaatagacaatataatgtttagtcctgaatttttaagagaaggaaaagctttatatgataatttatatccatcaagaataatagtgggagaaaaatcagatagagcagaaaaatttgctaatcttttaaaagaaaattgtttaaaagaagatgtagtagttaaatatatggattctactgaggctgaggcagtaaaattatttgcaaatacatatttagcacttagagttgcatattttaatgaattagatacatatgctgaattaaaaggtttaaatacaaaagatattatagatggagtatgtttagatcctcgtattggaaatcattataacaaccctagttttggctttggggggtattgtcttccaaaggactcgaagcaattaaaggcaaattataaagatgttccagagaatattatcagtgcaatagttgaatctaatagaactagaaaagaccatattgccgatatgatctcaaaaagaaacccaaaagtagttggaatatatagattaacaatgaaatctgggtcagataattttagagctagtgcaattcaaggagttatgaaaagaatcaaagctaaaggaattgaagttgttgtttatgagccaactttaaaagaagataatttctttaatagtaaagtaatcaaagatatagatgaatttaaaaagatatcagatgtcattatagtaaatagacttgatgaaaatgtatctagtgtaaaagataaagtttatacaagagatctattcgctagagattaaaaaaataggaggaaatcctaatgaacaaaaaattaataataagttggattttggttattctatgggcaggatttggactaatgtcaaatatttagacacaaaatgagctatatttttggaaagtcaacgaaaaactagacacggagttaagagaatttaagaattatatttttcaaagtcttttggagacttgtaatcaagacctgaatgcatcctttttgtattgtaataggtctcaatgtatttaaatatttcttgagtagcctcagctcttgtctcaaaatgagcatcattaataagctccctctttagcgtcttataaaaagactccatcattgcattgtcatagggatttcctttacgactcatgctagattgagcaccgacttgacgaagagtagattgataacgagagcttgtatattgactcccttgatcagtatggacaatcaagccaggctgaggatgttctttcccacaagcttgtaagaagcaatccctcaccagtttatcttgcatccgtgaagacattgaccagcctacaatcttacgtgaaaaaacgtcgatattcacggctaagtataaggtgccttctttggtagggatataggtcatgtctcccagccatactttattaggagctgttgctttaaagatctgattaattaaattgggtcttgaaagcgaagctccttttctgttgtaatgtttatatttataacggcttcccttggcataaagtcccatcaagtgcatcagtttcccaacacgtttcgtgttggtcataataccagtattatgaagtaccttggtaattctaaccgcaccatagcgtcccttatgctcatgaaagacagcttttatcttctctgagagaatttctctctccacttgttgttttgaaggacgacgatgcatgtattcatagaaacctgagcgagaaaccttaagaacttttactgcatgcttaatttttatcttcccatgatgtttcaagagaaattcaaaacgttttacttgcttcgcttcaagaagacccggaacttttttagaagttcaagttcctccttaagataacgattttctttctctaacaatttaatcttatgttgggcatcagctagggctgtcccattgcctggaaaagcactttctccatattcttcaacttcttgaacccagcgataaagactattggcatgaacctcaagctcttggctgacttctttaacagagtaaccctcttcaagaatgagttttactgcagaatttttaaattgtttatcgaattttcttcttgccataataaacctttccacgatttctcttaactttgtgtctagtttattataacctttccattttcttaaaataattttcttctttctgatttggagttaaaccatttttggcggaatgaggattataattgttataaaattgttcgatgtattcaaagcaagagagttgaacttcttgaatggagtgataagttctgcgattaatttctcgttgtttaagatacttgaaaaagacctcagtgacggcattatcataaggatatccaggcttggagtaagaagcaagcaattgatgctcatctaataactttctaaaggaagttgatttaaattggcttccttgatccgaatgaaaaataattggttccttaggtttcctcttatttatagctatttctaaggtgtcacaggcgagcttggcatcaatcctatcacttactttccacgcaatacatttccttgagtagaggtcaagaatagcacagagataaacatgtcgcttaggtcctatagagatataagtgaaatctgttgtccaaacttgatttggggagttcgggttaaattcttgtttaagcagattatcagaagaaaatacaggagatttatttgatttaaaacgaggtttgatggttgacattttagggagtgtcatagacttgagaagtcttaagatacggccttcagaaatattaacgccataatcacgcagaagaatgattttaaaagctctcgttccaattcttttcttggctttcatataaatctcaaggagtaattttctcaagcgttgattttctacttcacgcttcgaaggcctcttgtttatgaagttatagtaggtggaacgattgacatgtaaaacacgacagagcataactgtcgtgtgttcaaatcggagtctatagatggctttcaatcttacttggagttttgcatgaatatggcactcgctttttttaagatcagattttcttcctctagttgggcattccttttttgtaattcttgaatctgtttagcagtcaacaccgtattatcttcaagacgcacttgagagtactgcttaatccattttgcaagtgcagaagaagataccccataatctttacagagttcagtttgtgttttaccagtttgatagagattaacgagcgattgtttgaaatcctcgtcgtaacgtttaaaacctgacataaaagtcctttcatttttgtgtcctaatagacagattataacacacaattttctgtccacttttatagtatagctccaagatcgcttatcatcaaattgataaatataaaagaagtcaaatattttggggaatcaattttttaagttggattacagcaaccttctcctttattgcattttttttctttatcttgctcacacatgagtatcagaatatctatatttggcaaagtttactgattttggcaagtctttttgatatttcatggtactttatgggacgagaaaagttcaaagtcactgtaaccagaaatttcatcataaaaattttaaccgttatttctatttttgtttttgtaagaaatcataatgatttaccaatctatgttgcaatcatggggattggaagtttactaggaagcttatctttatggccctatctcagaaatgaaattaataagccaaatctaagatacctcaacttaaaaaaacatttacattacacagtcatcttatttatcccaacaatcgctacccagatttatctcatagcaaataaatccatgattggacttatggattctgtcactcatgccggattttaccaacaagcagacacaataataaagatggcattatccgtaattggaaccataggtgtcgtcatgttacctcgcattgcaagtatgcactcagaaggaaacatgaaagtaatcagagcatcgatcgtaaaaacatttaatatcgcaacagggatttcatttggtatcttttttggaattctagggattgcactacactttgcaccattcttttttggaaaatcctttgagatggtcggagtgattatgatgctagaagcccccatcattatctttattccaatgagtaatgtatttggtattcaatatctccttccactaaatagaatgagagcttttaccttatcagtaacctttggtgcattattaaatatcataataaattttgctttgataccgttacttggcgtgatcggagcaacggtagcaactgtggtatctgaatttgcagttacagcttaccaatatttatcaatcagaaaagagttttcattcagtgatttatttggtggactttggaagtattttatctcaggctcattgatgtttgtcgtagttttttggatgaatcaatcatttaaaatgacaataattcagctgatactccaaattatcttaggtgtactcatctatactctttctaatatcttattaaagacacagctatggcttatggcctcagaacttttaggaaaaatgaaaaatcgggtatcaagaaatcatatacgtatagatcaaaaacaagaaactctcgaacatccattagatacaattaaagcttcgtttgatcaatttgctatcctctttcaagaaatcgatgaaaaaaaatattatctcataagaactttttgacaaatcttaataattttgacaatacactgaaaaatgtaacatttaatgatgatttaaaaaaaatgatataataagattatcagatttcatcgctgagcttagtataattatgagcaaaaaaagagattatcttaaagttcaagatcaagagcacctctatcaatttgctcaaggtttaaatatccttgcatcaaaaatggagaaaattgcacaagaagaatattcaccaaaagagctaaaagaatggttcagaaaagagctgggcgaataactttatcaagtaaaaaaacaaggaatagcaagaaaggaaaagacatggagcagaaaaagaaaaagaatatttggctgataattgtacctatcttaataataatttcccttataggagcaggggcttatgccttaatagattcacttattcctactgatcatacgaaaacaaacagttcggatcaaccgaccaaaacttcggtttctaatggttatatagagcaaaaaggtgaagaagctgctgtgggtagtatagcacttgtagatgatgctggtgtatcggaatgggttaaggttccctcgaaggcaaatctagataaatttactgatttatctacgaataatatcactatttatcgaattaacaatccggaagtcttaaaaacagttaccaatcgtacggatcaacggatgaaaatgtcagaagttatagctaagtatcataatgctttgattatgaatgcttccgcttttgatatgcagacaggacaagtagctggatttcaaattaataatggaaagttgattcaagactggagtccaggtacaacgactcaatatgcttttgttgttaacaaagatggttcgtgcaaaatatatgattcaagtacacctgcttcaactattattaaaaacggagggcaacaagcctatgattttggtactgcaattatccgtgatggtaaaattcaaccaagtgatggctcagtagattggaagatccatatttttattgcgaatgataaagataataatctctatgctattttgagtgatacaaatgcaggttatgataatataatgaagtcagtgtcaaatttgaagctccaaaatatgttattacttgatagtggtggctcaagtcaactatctgtcaatggtaaaacgattgttgctagtcaagacgatcgagccgtaccggattatattgtgatgaaataaaaataaaagaacctcttggttcttttattttagagatttttcaaaaagggttttgactgagtctaattctgtttgagaaacgaccttagctccattttcatctgttgtatgtagattgagcttgctggtattctttagagccgtattatagctcataacgatcgttttagcatcattgaaacttatattggttttaacagtgtttgaaaaagcatagagaatttctcgatagtaattgaaactttcaagttttttcatatgagcaattttttgaatatttccgtagagttccattgagacattttgaatccgggtgattgaagcatccaaatcagtatcgtcaatttgtgtcatataggcttggacttgatcagcagtttgtaaattaacagttccttgtttaaactcataaccttcagcattgaatgcctttggattttgcatggtgattccaccagtggcctgtacaagtgatcccattttattaacatcaatctgaattactttgttaatggacacattcaataggtctttaaccatctggaaaattccatcatctccattcgtattgtaaacttcagtgattgttttttgattaggcattgtcgcaaaaactgggaagttcatgaaagtagtttgatttgtctttacattcgttgaagctaaaacagtagcataagctgtatttttagaattatttttaccagttgcaatgataagtgtggtgaatgttttagacttttttaagtcgatacttgttgttttagggaaattttcatatgatgttgaaaaggttgattcaacatttctataagctacgtaggctatagaagcaacagcgataattactaatacaaaaataattgaaataacttttagtactgtgtgttttttcttacgataatgacgcctctttttttgattcatggtatctccatatacatattatataccttaaattataccatatttaatgatgctatacttaaatcttagagtcactattgtataatt

SEQ ID NO: 92 - DNA, 18365 bp, Lactococcus lactis
  DSM 33136 eps gene cluster, complete sequence
atgtttatgaatgatttattttaccatcgtctaaaggaactagttgaagcaagtggtaaatctgcaaatcaaatagaaagggaattgggttaccctagaaattctttgaataattataagttgggaggagaaccctctgggacaagattaataggactatcagagtattttaatgtgtctccaaaatatctgatgggtataattgatgagcctaatgacagttctgcaattaatctttttaaaactctaactcaagaagagaaaaaagaaatgtttataatttgtcaaaaatggctttttttagaatatcaaatagagttataacaataataaatttagggagtttttcttattgatatgatgaaaaaaggaatttttgtaattactatagtgatatctatagcattgataattggaggtttttatagttataattctaggataagtaatctttcaaaagctgataaaggaaaagaagttgtaaaaaatagcagtgaaaaaaatcagatagaccttacctataaaaagtattataaaaatttaccaaaatcagttcaaaataaaatagatgatatttcatccaaaaataaagaagttactttaacttgtatttggcaatctgattcagttatttctgaacaatttcaacaaaacttacaaaaatattatggaaataagttttggaacatcaaaaatatcacttacaatggcgaaactagtgaacaattattggctgaaaaagttgaaaaccaagtattagccactaatcctgatgttgttttatatgaagctccactttttaatgataaccaaaacattgaagcaacagcctcactgactagtaatgagcaacttataacaaatttggctagtgcaggagcggaggtaatagttcaaccctctccaccgatctatggtggtgttgtgtaccccgtacaagaagaacaatttaaacaatctttatctacaaagtatccctatatagactactgggctagttacccagacaaaaattctgatgaaatgaagggactgttttctgatgatggagtatatagaacattaaatgcttcggggaataaggtttggctagattatattactaaatattttacagcaaactaattaagttataaataacaattattaaatattggagaagaaatgcaggaaacacaggaacaaacgattgatttaagagggatttttaaaattattcgcaaaaggttaggtttaatattatttagtgctttaatagtcacaatattagggagcatctacacattttttatagcctccccagtttacacagcctcaactcaacttgtcgttaaactaccaaattcggataatttagcagcctacgctggacaagtaaccgggaatattcaaatggcgaacacaattaaccaagttattgttagtccagtcattttagataaagttcaaagtaatttaaatctatctgatgattctttccaaaaacaagttacagcagcaaatcaaacaaattcacaagtcattacgcttactgttaaatattctaatccttacgttgctcaaaagattgcagacgagactgctaaaatatttagttcagatgcagcaaaactattgaatattactaacgttaatattctatccaaagcaaaagctcaaacaacacccattagtcctaaacctaaattgtatttagcaatatctgttatagccggattagttttaggtttagccattgctttattgaaggaattgtttgataacaaaattaataaagaagaagatattgaagctctgggactcacggttcttggtgtaacaacctatgctcaaatgagtgattttaataataatacgaataaaaatggcacgcaatcgggaactaagtcaagtccgcctagcgaccatgaagtaaatagatcatcaaaaaggaataaaagataggagttcaggatggctaaaaataaaagaagcatagacaataatcgttatattattaccagtgtcaatcctcaatcacctatttccgaacaatatcgtacgattcgtacgaccattgattttaaaatggcggatcaagggattaaaagttttctagtaacatcttcagaagcagctgcaggtaaatcaaccgagagtgctaatctagctgttgcttttgcacaacaaggtaaaaaagtacttttaattgatggcgatcttcgtaaaccgactgttaacattacttttaaagtacaaaatagagtaggattaaccaatattttaatgcatcaatcttcgattgaagatgccatacaagggacaagactttctgaaaatcttacaataattacctctggtccaattccacctaatccatcggaattattagcatctagtgcaatgaagaatttgattgactctgtgtccgattcctttgatgttgttttgattgatactccacctctctctgcagttactgatgctcaaattttgagtatttatgtaggaggagtggttcttgttgtacgtgcctatgaaacaaaaaaagagagtttagcaaaaacaaaaaaaatactggaacaagttaatgtaaatatattaggagttgttttgcatggggtagactcttctgactcaccgtcgtattactactacggagtagagtaattggaatgaattttaatcaaataaaagacagaaatttgtaggagaggagagcagatgattgatattcactgccatattttaccggggatagatgatggagctaaaacttatgaagatactttgaaaatgctgaaatcagcaattgatgaagggataacaactatcactgcgactcctcatcataatcctcaatttaagaatgaatcaccgcttattttgaaaaaagttaaggaagttcaaaatatcattgacgaacatcaattaccaattgaagttttacccggacaagaggtgagaatatatggtgatttattaaaagaattttctgaaggaaagttactgacagcagcgggcacttcaagttatatattgattgaatttccatcaaatcatgtgccagcttatgctaaagaacttttttataatattcaattggagggatttcaacctattttggtccaccctgagcgtaatagtgcaatcattgagaaccctgatctattatttgattttattgaacaaggagtactaagtcagataactgcttcaagtgtcactggtcattttggtaaaaaaatacaaaagctgtcatttaaaatgatagaaaaccatctgacgcattttgttgcatcagatgcgcataatgtgacgtcacgtgcatttaagatgaaggaagcgtttgaaattattgaagatagttatggttctggtgtatcactaatgtttcaaaataatgcagagtcagtgattttaaacgaaagtttttatcaagaaaaaccaacaaagatcaaaacaaagaaatttttaggattattttaaaaggagtaaaaggagtaaaaggagtaaataatggaagtttttgaagatacctcatcacctgaaccgaaagaagaaaagttagtagaactaaaaaaattttctcacagagaaatatttattaaaagaggaattgacattttagggggattagtgggttcaattttgtttcttattgcggctgcattgctttatgtcccttacaaaatgagctcggaaaaagatcaagggccaatgttctataaacaaaaacggtatggaaaaaacggtaaaattttttatattttaaaatttagaacaatgattcttaatgctgagcagtatctagagctacattcagaagttaaagccgcctatcatgccaatggtaataaactagaaaatgatccacgggtaacgaagattggttcatttattagacaatactcagttgatgaattaccacaatttatcaatgtccttaaaggagatatggcattagtcggtccaaggccaattcaacagtttgaagcgaaagaatttggggagcgcctcccttatttactgatatgtaaacctggaattactggttattggacaacacatggtcgcagtaaagctccttttcctcaacgagcagatttagaactctattatctccaatatcacagcaccaagaatgatatcaagcttcttatgcttacaattgcacaaattattcacggatcggacgcatattaaaaaacaatgaaaaaaaagaaattattactaataagtcaaagcggaagaggtggagtaaggaggcatttgtgtgatcttatgcttaacctcgattatgaaattttcgaggtatgggttgcttacaatgatgatgctattgatgatatatttagacaaacaatagagcaattatcaggaaaaattactcctatactaataaataatcttgtcagggaattaaatttaaaggaggatataaaagcatatttaaaattaagcaaactaataaagaaagtcaagccggatattgtacattgtcacagttctaaagctggtgttattggtcgtttagctgccaaaagacgaggtgttaaaaaaatattttatacgccacatgcttattcgtttttggcacctgaatttagtggaaagaaaaagtttctttttgttcaaattgaaaagtttttaagccgattttcgacaactcagacattttgtgtgtcaataggggaaatgcaagctgctcttgaagtaaatctagataaaaccgataagtttcaggtaatttataatggtttgccagaaattgatttaccaagcaaagaaacgattcgggcgcaattaggactggaaaagacagtagttgttataggcaataacgcaagaatgtcggaacagaaaaatcctatgttttttatggaaattgcccaaaaaatgattagacaaaacgcaaattggcattttgtgtgggcaggtgatggtcagcttatgccactttttcaatcatttattaagcaaaatggactagagaaaaatattcatttgcttggggagcgtcctgatagtgaaacagttgtgacagcctatgacatcttcttgacgacttcccaatatgaaggtttaccttatgcaccaattgaagcgatgcgagctggtgtcccgattcttgcgacaaatgttgttggcaatagtgagcttgtgatagagggaaaaaatggttatttgatcgacttagagtggtcaaaatctgtcgaagaaaaattatataaggcagcgaaaatggatgcacaaatgattaaagcagattttaggcaaaggtttgcgattgatcagatgttaaagcaaattgaaacaatttatttagcttgaatgaagaaagtaaaaagaatggataagtgtaaatgtatatacataatctaatttccgtcattattccagtatataatgtagaaaaatatttagaaaagtgtttgaagtctgttcaaaatcagagttatgcgcattttgaagtgatcttaatcaacgatggttcaacggattcttctttaaaaatttgtgaggcatttatcaaaaaagataagcgcttttctgttttaacaaaagaaaatggtggactttcttcggctcgaaatttgggtttaaaaaaaatcaggggaaaatatgtgacatttgtggatagtgacgattatctatcagagcattatcttaaacattttgtgagtggtatagagagtgaaaagagtatcgtttgttcaaaatttcttcttgttgatgaaaatggtgtttttctttctaaaagacagagaattcaagaaaaaaaacttattttttctaaagaagaaggcataaaagaaattttattacaaaataaaatggatcactcagcttggggaaaattatatccgatatctttttttgaaaatatcacttttccagatggaaaattgtttgaagatatgggaacgacctataagttattggctttagctaacgaagttgtatttttagatgaatatgattattattatcttcaacaacccaatagcattatgaacagttcatttaatttaaaaaaattagatattatagatatgtcaaaggaaatgattaaagatatcgttaatacctgccctcaacttgtgaattatgctaaaaatagagcatttagtgcagaggcaggtatctttttagatgtgccaaatactaaagcgtttgaatcggcgcaaaagctgctttggaaagaagtaagagaaaatagatatgcaccatttttgataaaaggggctagacttaagaataagttaggtgctattttgtcgtttttgggtaggagattttttttgaaactcgggaaacagttggtaggtaaataaggaggcaacagatggcaatttattttttacttttcccgatgatcgcaatgatttatttaatgacattgctcttacgacaaaaagcacaaatccaaaaaacgattttttgtgttcttacgtttggtacactaggctttatttcagcaagtcgtgcttcaagtgttgggacagatgttacgctatacgaaaatatttttaaatctataaattacgggataagtgctgaaaataatttgggatatgtcatctataacaagttgattggtagtgtatttggctatacgggacatgaaatcacagctgctaattctgttttgattacgatacttattggtttttttatttggaaagtagcggaacattattttgttgcgacgtttttatacattagcttgttttattatgctacaagttttaatatttcaagacaatttattgccatggggcttgtattggtagcaatttcttttgctttagataaaaaggttatgccttggtttatcttgacagttttggctaccttatttcatgcgacagcaatcgtttcttttcctgtctattggcttacaaaagtacattgggatgtgaaaaagacattaggtatttttccaattacgatttttgcaagttttatttttgatgctattttaaacatttttttacgttttttcccacattatgagatgtatattactggaacacaatttaatattgcagatcaggggcagggacgtgtggttttggtcaaaatatttatcttgctcattttgtttactttaatcttgttttataaaaaaagctatgctttgatttctgaatgtcatcaaagtttgatagctttgacaaccgttggattaagtatcggtattgtattttataataatattttactcaatagaatagaaatgttttattcaattttaagcatcgtatttattccaattgctatagattactttagtttgaaatttaaagaaaaagatactgtgcgacaaatgctgacgataggtattttgttaattacacttgtgccttactatatacaggttagcggtaattattcaggaatattgccatatacgatgaataaatagaaatatgtgttaaagaacataggagaaaaaatgaattattctttttgtacaacattcttttttggaaaaaataaaaacggatataaaaatatgagtagtaactcattagagcaacatgatgagacatatttgaaaacttttgttacgttatttgtcagtctgaaaagatatagctttgaaaaaaagctttttgtaaatgatttagataggttaaagagggtaagagagggaaaatattattcaattttagtagaagaattagaggtacgagtatacgaagtatcctctaagtttgttgatgaaagtaaagagtgggcgggctcaatgttcatctttgatgtgttatcttttatttatttaaataagcaacagttttcagttgataaatggtttttcgtagatagtgatgttgttttctttgattatatggaagatactcttaaattactaaatcaatatgatcttgctagctatactcaatggcaagagtttagaatgttaaatctttggacagaggattttcatggtgcagatttttcaaaactagattcctctattacacctttaggtggagaatttttgatgcttgatactgctaggattgaaatatttttaagtaagttcaaatcattttattgtcagtttcaagatgtgatgcatacagaagaaaattactacagtttgattgtagattctcttgttaaagaaggttataaaaattatgtagtaaatccttttttcaaaagatcattagccttaaatagagcttttacggataaatactgttggggtgttcattttccaggacaaaaaaattataaattgaagtatttatatagtgcagtcaagaaaaataattataatatggacatttctaaatctaaaaaaataatgggtttgaatacacattggaatatatatgatttttctttaatcattaaaacaatgaggaatttaaaaaataaaattgtaaaacagtaaactataatatctaaactattactgacttaaaatctaaagaaaaaattgtatagattcacattattacctgtactttgcctattatatacaggttagtggaagttattcaggtatattgctgtatattatttagccatgacaatatgagaactgtgaagataaagtatgaaaaagatagaacttattgtaaaagatatggagatggaagggtttcagaaagttacgtcagttgtaaccagtaccctatcttcaaaatttgaagtttctattttatctatggcatagacggattctttttttgaactatctgtaccattagaaacaatcaagtttactgaacgaaaattgccttgggtatttaggaaaatacttactaaatttaggtatgaggttgtgttaacagataaattacatggtatgattttttcatatatcacaggcacaccatgtattgttttggctaatgataatcataaaattgaagaaacatacaaacattggttgaataatgcgaattatattcgttttattgaaaaaacgactgttgaaaatattttagatgcaataaatgaattgaagcaaatcaatatattgaggcaatcaagagtttagaaatcagagagtaatctgttggaggaaataaattatatgatgaagatatcagttattgttcctgtttataatagtgaaaacacaattgaaaagtgtttaatttcattgcaaaagcaaacatataaaaatttagaaattattgtaataaatgatggttcagtggatacaacagaagataaaatagtaagaattatagagaatgataaaagatttatttattttaaaactgccaatcaaggacaatctgaagcgaggagttttggattgagtaaagcaactggagagttaataggattcgttgattcagatgattttatagattatgatatgtatgaaatattagaaaaaaatatgagagatacaaaatcagatatttcaattataagatcgataatatcatttccaaatggattcgaaataatacctagctgtcaaaatactttttttatcaaaacaggtaatgaaatgatatttgagtatattggtggttttcattttggggttgccctatgggataaactttataaaagaagtttatttgatggattaaaattagatacttcttttaatttaatggaagatgctttaatgggtaactatgtgtttaataaagcgaaaaaaattgtttatacaggaaaagcaaagtatcattatttgcagagaaaaaacagtacagccagaaaaaatttggaagatagtgatttaaaggcaataggtgttgtcttgggtatgaaagagctttatactgatagcattgagttagataaagcatttcaacgcagatttgcacaaacaatactggaattactcagcaaaaatcccacaaaagaacaacgaaaacaaatagagagagctttgtttgaaacaatagaattagataaattgggttatttaaaaaagggtgataagttgctaataagattgatctattataaatttccgtcatctcccttaattcaagccaaaaaaatgattggacgaacagtaagaaaatttaagaagatatagaataataaagcaaattgagatgatgaatcttaatttttcaatcaataactcaattgtttaggtgagattgaaaactaaaacaagaaggaaaaggaaaaggaaaagaaaaagaattgaaaatagagaataatgaaaaggatggaaggggtgaaagataaataaatataaaaattattgtccaatgcaagtttattattgccgtttataggcatgaatatttttgatgctactttgagatttgctatggataaatcagttaccaaagaaaaagttctgagtaattcttctatggtctgatgtttgaggattttattttcactaaggagtatgtagcatccatagaaagtagtgcatttgtcaaaaaaactggttacttttatgatataagcgatatgaattcagcaactaaaaaatatagagaaaataaattagacgagcagcttattttagaaaaaggaatcgaatatttcttgtaaaaaatatgatattccattgaaaaaaattgtagatatacgaaaagtaaatatgtgtttagattcattattaaatttagtaaaaaggatattgaagagctaaaaaacagagtagattcggtattgaaagaagtcagctttaagttatcattaaaatatcaaataaaaatattttttattcataatttttggttgattaagatgatatataaataaaaagtaacagtaacggagggaaaatgaaaaattatgtaaatggttggtggaaaaccaatttaggagatgatcttttcttacatataatatgtgaacgttatagaaatcaaagtttttttataacttgtgaaaaagaggagatgactgtttttcaacatttgaataacttaaaaattattgaagagaataaaagttctgtcgttattaaattgttttcgaagtttttaagagtaatgtatttttggataccattaagtgttttgaaagaatggatagaattattctttttaagaaaaagaggaatatctgataaaaatgtagtggttattgaaattgggggctccatttttatgatgccaaaaagaaaagatatctcaatgacagaggggtattttttacgtaatattgaattaaaaaactttcctaactattatgtagtaggaagtaattttggtccattttattttcaagagcaagtagataaatataaagaactattttctaaaatgcaggatgtatgtttcagagatacatattcaaaaaaattatttccaaatctagatacagttagaagcgcgacagatgttgtcatgagtttaaggatagaggattatcaacaaatcccagagaaaaaacaaattataatttctgtgattgatgtattatctaaagaagatacaggattagagggtaaacatcattttgcaaataaatatgaaaaatttattttatctgtaacagaagattatgtaaagaaaggttataaagtagtattgttttctttttgtgatttccagaatgatcatttattttctcagaaaattttcaatcagttaaataagacaataagatctaatgttgaacttttttctcataaacaaataaataaatcactctctaagattgctgaaagtgaaaaaatcatagcgaccagatttcacgcaatgattttaggatggttatttcaaaagcctacttttgtaatctcctacagtcaaaagacaactcaagtgattgaaaatagctttaataagcaaacatttgttgactataataaggtagaaaagttgaatcttaataatatggatgattattttgttaaaattgatgatttgaccaaagaatatttaattaatgatgcgcaaaatcaatttagagggttagactcattattgcaatcataatctttaaatcaaagaagagagaaaatgaataaatacaaaaaactgctatccaactcactcgttttcacaataggaaatttgggtagcaaactgttagtctttttactcgtaccactctacacttatgcgatgacaccgcaagagtatggtatggcagacttgtaccaaacaacagccagtctacttttgccattgattacgatgaatgtgtttgatgcaactttacgttttgccatggaaaagtcaatgacaaaagagagcgtcttaacaaattctcttgtagtatggtgttttagcgctgtgttctcttgtttcggcatgatttttgtctatgcactgaacttgagtaataaatggtacttagccctactttttcttatcatcttattccaaggtgggcaaagcatactaagtcaatatgcgagaggcattgggaaatcgaaattatttgcagctggcggagttattttaacctttttgacaggtgctttaaatatcttcttcttggtatttttacatgctggaattacgggctacctcatgtccctagttttagcgaatttagggacaatccttttttttgcggggacactttccatttggcaggcaatcaattttaaagtaatcgataaggaaatgatttggcaaatgctctattatgccttacctttaattcctaatgccatcatgtggtggtcactgaacgcttctaatcgctatttcgttttattctttttaggagcaggtgctaatggccttttggcggtcgctaccaaaatcccaagtattatttcaatttttaatacgatttttacacaggcatggcaaatttcagccatagaagaatataattctcatcaaaaatcaaaatattattcggatgtttttcactacttagcaacttttctattgttagggacatcagcttttatgattgtgcttaaaccagttgtcgaaaaagtcgtttcaagtgactatgcaagttcatggcaatatgtccccttctttatgttggcgatgttattttcctcattttctggattttttgggaccaattatattgcggccaaacaaacaaaaggcgtatttatgacatctatctatggtgccattgtttgtgtcctactccaagtggtgctgctacccaccattggcttgaatggtgctggattagcttcaatgctaggattcttgacaacatttttattgcgtgttaaagatacgcaaaaatttgtggcgattcagattaaatggcgaatttttatcagtaatttattgatcgttttggcacaaattttatgtttgttttatctaccgagtgaatttttgtattttggtcttgcccttttgttttgtggcatgttagttgttaatcagcgtacaattttatacattatcatggcgctaaaaaataaaaaataagatatttgggatgaaatcctcatataaatagacagtagatgtatctcgataccattcgagttgcatctactgtctatttttagtatgcttttaggttagctcaactcaaccgcctcttaatctcccaacaacaataaaacccaatcaaacaccccaaaaaattcaagagaatatcactgatggcaaatgtgcccagatagaaaacaaactgaatggtttcaattcctaaaagtgtgaccaaactgacaatgacaaactgtttgaaatcagtattgataccataaaagccacctaaaggaataaagtagagaatatttaacaccgcctcctggatcgttctggtatccgttttgataaaatcaaaagggttcagtgatatcgcttgaaaatccgatgttttagtaaagagcaccatgaatagcagtaatgcatacacactgaaggccagatagagataaataactgaaaatcgtttgaggtgatactggatgccaaacaaccagacgatcagcgttaataagagtattaaagttaatgcggtatggtcaaaatggtcaatgaccttaagcagatttggatagcgtgtgagaacgggcatgatcagccaagttatcgtcgcataactcaggctaaatgtgaccaataaactgctgaggtagatcatatattttcgcaactgtttctaactccttttcttgatgagattaaccctattttaacatattttaaaactgtcatgtttttatgaatttaaaataaagggcacctctaataactaccaattaattcacctctaaatgaaattagaaaaaaacacagaaaactaagcatagtctactgtgtttttctttatgttacagacgccacttgactgtttattcttattttagacagattacctccatgttttgagatttaaacgtttaacttgttcgtacctcaataagttataagtcagatttgtaaggtcagtatttaaaacagctcgatcgaatccaatagaacgtaaactagaaccatgcattgaattttcaacaaagccaaatacatgttcaatacggacacgtattttcgaaatgattttattaaacattttatcgtctgccttaagagatttagaacgtgtgtttttaagacaggtaaaaagttcagcacctttaggtgttgcttgattttgataagctgagtctgctaaggtgatctcatcgggatcaacaagaacgcctattacttgagaatcatgcacatttgcaggcattgtttgataattctttacgaattttgatttggtatctatagcaatatgatttttgtagccatagtgtctctcattacctttaattgtccagcgagcagctgtatccttctgtgctcttttgttcttcgtccaattcactggtaccctatttgctttaatcaattcattttcgtcttttggattacgttgtttaggcgcctctatgaatgttgaatcaacaatctgtcctttatgagcgatcatcccttgtgattcaagtttttcttgaaaggcagaaaaaagccagttccctctattagattttgatagctgatttctaaagttccagatagtctttgcgtctggtaccttgtcatcaatcttaaggaatcttctaaacgaaatccggtcaatcatttgatattccattgcatcatcagatagattgtataagcgttgtaaaattagaattttcaacattaaaacaaggtcatagggcggtctaccaccatgagatttgttttttaaatcatacttaaaaatccggttaagagttgggcgaaaacactcgaaatcaaccactttttctagccgctcaagagggtctccttttaaacttaatttttcaagatagtcgctatctccaaataaattcatcttcaatacctcgttagcttatttttaatctattatacctcttttcatacgtttttagaggtgcccttaaacttatatctttatttatacgtaaaatttcttgcagtttaaagtttgaaacccataccttcacttgcattaaaagattttatactatataatatattaattagatacaagtatatctactgtgtgatgttaagccaagtccttagagtcaagagtgtataattttaatatattttttaagctatcactttttcaaattaattgggggtaagatatcctaaactttgatgaattcgtcttgataaaacgtttcaatgtaccaaaaaatactctgataggctgcttcaaattttttgcagtagttcctcagtcattcgcttacccaaattccaagcaatgatttttttagcataacgatttataatagttgagagataacaccaccctccgaagagtggtcttgtaaggaatatcggttgaccaaaccttatttttttctgtcgggtaagtatgtatgatattctttcggttaacaggatcatatatgaatatcctggtttaaatttttttatgaccacagaatatagttgaagttgcttcattaacttttgtaccagttttaaactgtttttttccatgtttaagcaagaggtgagaatcttaggcactctatagatgacttgttcttccttaactttggccggtgtctttttaattacatttcatctacttttgagacatagatttcattaaacttggagtagaggtatactctttagaaagctgagtgatgaatcgttctgagtggtaggactcgaccagggtttctttaaattcttttgaatatcgtttttgcatgactttttactttgtctaaattatacaattcccagtctaagatgtaagaataatatcagactacgcaatgttttttatattttgtatataatttagtgatcactaggatatcactaaattactctaacttcattatattacctagaccaaatgtgttatagcgaaataagtaaaaattatagttattacttttgatattattccagaagaagtgaattaaatttagttcagtagtagatagaaaattagagtttttttgacaaattgagatttgaatttgcttgcaatgagagttgcagttattgcgcttaaggaaatcggttgttgtaacagcaactaattatgatgatgtaaggacatattttaacatacgttttgtacgtgatttacatacattcgaaaagtttagatttgatcgtgactaaacaacaattttggaggaaaaattggaacgaaaaaaaaagaaaaaaaagaatatttgggttataattatacctatcttaatttttattacccttataggagcaggggcttatgccttaagaaattcacttattcctactgatcatacgaaaacaaatagttcggatcaaccgcccaaaacttcggcttccaacggttatgtagaacaaaaaggcgaagaagctgccgtaggtagtatagcacttgtagatgatgctggtgtaccagagtgggttaaagttccctcaaaggtaaatctagataaatttactgatttatctacgaataatatcactatttatcgaattaacaatccggaagtcttaaaaacagttaccaatcgtacagatcaacggatgaaaatgtcagaagttatagctaagtatcctaatgctttgattatgaatgcttccgcatttgatatgcagacaggacaagtagttggatttcaaattaataatggaaagttgattcaagactggagcccaggtacaacgactcaatatgcttttgttattaacaaagatggttcgtgcaaaatttatgattcaagtacacctgcttcaactattattaaaaacggagggcaacaagcctatgatttttatggtactgcaattatccgtgatggtaaaattcaaccaagtgatggctcagtagattggaagatccatatttttattgcgaatgataaagataataatctctatgctattttgagtgatacaaatgcaggttatggtaatataatgaagtcagtgtcaaatttgaagctccaaaatatgttattacttgatagtggcggctcaagtcaactatctgtcaatggtaaaacgattgctgctagtcaagacgatcgagccgtaccggattatattgtgatgaaataaaaataaaagaacctcttggttcttttattttagagatttttcaaaaagggttttgactgagtctaattctgtttgagaaacgaccttagctccattttcatctgttgtatgtagattgagcttgctggtattctttagagccttattgtagctcataacgatcgttttagcatcattgaaacttatattggttttaacagtgtttgaaaaagcatagagaatttctcgatagtaattgaaactttcaagttttttcatatgagcaattttttgaatatttccgtagagttccattgagacattttgaattcgagtgattgaagcatccaaatcagtatcgtcaatttgtgtcatataggcttggacttgatcagcagtttgtaaattaacagttccttgtttaaactcataaccttcagcattgaatgcctttggattttgcatggtgattccaccagtggcctgtacaagtgatcccattttattaacatcaatctgaattactttattaatggacatattcaataggtctttaaccatctggaaaattccatcatctccattcgtattgtaaacttcagtgattgttttttgattaggcattgtcgcaaaaactgggaagttcatgaaagtagtttgatttgtctttacattcgttgaagctaaaacagtagcataagctgtatttttagaattatttttaccagttgcaatgataagtgtggtgaatgttttagacttttttaagtcgatacttgttgttttagggaaattttcatatgatgttgaaaatgttgattcaacatttctataagcggcgtaggctatagaagcaacagcgataattactaatacaaaaataattgaaataacttttagtactgtgtgttttttcttacgataatgatgcctctttttttgattcatatgctctagaatttaaaa

SEQ ID NO: 93 - DNA, 1050 bp, Lactococcus lactis
  ORF coding a putative NAD-dependent epimerase/dehydratase family protein 1 of DSM 33139
atgagtatagtaactttagataaaaaaacgattttagtcacaggtgcagccggttttataggctccaaccttgtgaaacgaatctatcaggaggctccttctgctacggtcatcggcatcgacaatatgaatgcctactatgatgtggcactgaaagaattccgcctgaacgagctggccaagtatcccacattcacttttgtaaaaggcaacatcgctgataaggcactgatcaccgagctgttcgagaagtacaagccgtctgtggtcgtcaaccttgcagcacaggctggtgtgcgctactccatcaccaacccagatgcttatgtggaatctaacttggtcggcttctttaatatcctcgaagcctgccgtcattgtgagagtctggagcatttggtttatgcttcttcctcctccgtctatggttctaataaaaaggttccatacagcacggatgacaaggttgacaatccggtttccctttatgcagcaaccaagaaatctaatgagttgatggcacacgcatactccaagctctacaacattccttccactggcctgagattctttacggtgtatggccctgcaggtcgcccggacatggcttacttcggattcaccaacaagctggtgaagggcgaaaccatcaaaatcttcaactatggcaactgcaagcgtgattttacttatgtggatgacatcgttgagggcgttgttcgtgtgatgaagaaagcaccagacaagaagaatggtgaagatggtcttccgattccgccgtatgcagtttacaacatcggcaatcagaatccggagaacctgctggactttgtgcagattctgagcgaggagcttgttcgtgcaaaggtgctgccggaagattacgatttcgaggctcataaagagctggtcccgatgcagccgggtgatgtgcctgtgacctatgcagatacgagtgcactggagcgcgacttcgggtacaagccgagcacaagtctgcggactggattaagaaagttcgctgagtggtacgctgagttttataaataa

SEQ ID NO: 94 - protein, 349 aa, Lactococcus lactis
  33139_NAD-dependent epimerase/dehydratase family protein 1
MSIVTLDKKTILVTGAAGFIGSNLVKRIYQEAPSATVIGIDNMNAYYDVALKEFRLNELAKYPTFTFVKGNIADKALITELFEKYKPSVVVNLAAQAGVRYSITNPDAYVESNLVGFFNILEACRHCESLEHLVYASSSSVYGSNKKVPYSTDDKVDNPVSLYAATKKSNELMAHAYSKLYNIPSTGLRFFTVYGPAGRPDMAYFGFTNKLVKGETIKIFNYGNCKRDFTYVDDIVEGVVRVMKKAPDKKNGEDGLPIPPYAVYNIGNQNPENLLDFVQILSEELVRAKVLPEDYDFEAHKELVPMQPGDVPVTYADTSALERDFGYKPSTSLRTGLRKFAEWYAEFYK

SEQ ID NO: 95 - DNA, 897 bp, Lactococcus lactis
  ORF coding a putative glucose-1-phosphate thymidylyltransferase RfbA protein of DSM 33139
atgaaaggcgttattttagccggaggttcaggcacacgtctttacccattaacgaaagtaacaagtaaacagcttttgccaatctacgacaaaccgatgatttattatcctatgtctgttctgatgaacgctggcatccgcgatattttgattatttccacaccgcaggatacacctcgctttgagaatctgctgggtgatggacaccagtttggtgtgaatctgacctatgcggttcagctgtctccggatggactggcacaggcctttatcattggtgccgactttatcggtgccgattctgtagctatggtgctgggcgataacatctttgcgggccacggattgaagaagagattaaacgcagcagtggaaaaggcagaaaacggcaagggtgcaacggtgtttggctactatgtggacgatccagagcgttttggtatcgttgagttcgataagaacggtaaggccatttctatcgaggagaagccagaacatccgaagagcaattactgtgtcaccggtttgtacttctatgataaccgtgtggtcgagtttgctaagaacctgaagccgtccgctcgtggtgaattagaaattaccgatttgaaccgtatttatctggaagatggtactctgaatgtagaattgctgggtcagggcttcacttggctggacactggaacacacgagagccttgttgatgctaccaactttgtaaagaccgtggaacagcatcagcatcgtaagattgcctgtctggaggaaatcgcatatctgaatggctggattagcaaggatgagctgatggaggtctatgaggttatgaagaagaaccagtatggacagtatctgaaggatgtcatggacggcaagtatcaggagcatttgtattaa

SEQ ID NO: 96 - protein, 298 aa, Lactococcus lactis
  33139_rfbA
MKGVILAGGSGTRLYPLTKVTSKQLLPIYDKPMIYYPMSVLMNAGIRDILIISTPQDTPRFENLLGDGHQFGVNLTYAVQLSPDGLAQAFIIGADFIGADSVAMVLGDNIFAGHGLKKRLNAAVEKAENGKGATVFGYYVDDPERFGIVEFDKNGKAISIEEKPEHPKSNYCVTGLYFYDNRVVEFAKNLKPSARGELEITDLNRIYLEDGTLNVELLGQGFTWLDTGTHESLVDATNFVKTVEQHQHRKIACLEEIAYLNGWISKDELMEVYEVMKKNQYGQYLKDVMDGKYQEHLY

SEQ ID NO: 97 - DNA, 1020 bp, Lactococcus lactis
  ORF coding a putative dTDP-glucose 4,6-dehydratase protein of DSM 33139
atgaatattattgttaccggcggtgcgggttttattggtagtaactttgtgttccacatgctgaagaagtatccgggttatcgaatcatctgtttggacaagctgacctatgcaggcaatctgtccacactggcccctgttatggataacccgaatttccgcttcgtgaaggctgatatctgtgaccgcgaagcagtgaataaactgtttgaagaagaacatccggacatcatggtcaactttgcggcagagtctcatgttgaccgttctatcgaagatcccggcatcttccttcagactaacatcatcggtaccagtgtgctgatggatgcttgccgcaagtacggcatccagcgttaccatcaggtttctactgatgaagtttacggtgacctgcctctggatcgtcctgacctgttcttcaccgaggagactccgatccataccagctctccgtatagcagctccaaagctgctgctgacctgctggttctggcttaccaccgtacctacggcctgcctgtgaccatttcccgttgttccaacaactatggaccgtatcacttccctgagaagctgattccgctgatgatcgctaatgctctggctgacaagccactgcctgtttacggcgagggtctgaacgtccgtgactggctgtatgtggaagatcactgcaaggccattgatctgattatccacaagggtcgtgttggtgaagtctacaacgtcggcggtcacaacgagaagcagaatattgagatcgtgaagattatctgcaaggagctgggcaagccggaaagcttgatcactcatgttggtgatcgcaagggtcacgatatgcgttatgctattgatccgaccaagatccacaatgagctgggctggttgccggagaccaagtttgaggacggcattaaaaagaccatccagtggtatctcgataatcgtgagtggtgggagaccatcatcagcggtgagtatcagaactattatgagaaaatgtacagcaaccgctaa

SEQ ID NO: 98 - protein, 339 aa, Lactococcus lactis
  33139_dTDP-glucose_4,6-dehydratase
MNIIVTGGAGFIGSNFVFHMLKKYPGYRIICLDKLTYAGNLSTLAPVMDNPNFRFVKADICDREAVNKLFEEEHPDIMVNFAAESHVDRSIEDPGIFLQTNIIGTSVLMDACRKYGIQRYHQVSTDEVYGDLPLDRPDLFFTEETPIHTSSPYSSSKAAADLLVLAYHRTYGLPVTISRCSNNYGPYHFPEKLIPLMIANALADKPLPVYGEGLNVRDWLYVEDHCKAIDLIIHKGRVGEVYNVGGHNEKQNIEIVKIICKELGKPESLITHVGDRKGHDMRYAIDPTKIHNELGWLPETKFEDGIKKTIQWYLDNREWWETIISGEYQNYYEKMYSNR

SEQ ID NO: 99 - DNA, 609 bp, Lactococcus lactis
  ORF coding a putative dTDP-4-dehydrorhamnose 3,5-epimerase protein of DSM 33139
atgggacagattaaagttgaaaaaaacgtaggcggtatagagggactttgtgttattgaaccggttgttcatggtgactcccgtggttatttcgtggagacttacaacgagaatgatatgaaggaagctggtataggtattcactttgtgcaggacaatcaatctatgtccacaaaaggggtgttgcggggattacactttcagaagcaatatccgcagtgcaaattggtgcgtgttgtgaacggtacggtgtttgatgtcgcagttgatttgagaagtaattccgaaacttatggtaaatggtatggtgttgttttgtccgccgagaacaagaaacagttccttattccggagggctttgcacacggcttcttagttctgagcaatgaagcagaattctgttataaggtcaatgatttttatcatccgaatgatgagggcggaatggcttggaatgaccctgaggttggaattgaatggccacaactgaagggcgaatacaagggcaatgcaagtgcagaaggatatacgctggaagacggtacagcgctgaacctgagcgataaggaccagaagtggctcggactgaaggatacttttaagttctga

SEQ ID NO: 100 - protein, 202 aa, Lactococcus lactis
  33139_dTDP-4-dehydrorhamnose_3,5-epimerase
MGQIKVEKNVGGIEGLCVIEPVVHGDSRGYFVETYNENDMKEAGIGIHFVQDNQSMSTKGVLRGLHFQKQYPQCKLVRVVNGTVFDVAVDLRSNSETYGKWYGVVLSAENKKQFLIPEGFAHGFLVLSNEAEFCYKVNDFYHPNDEGGMAWNDPEVGIEWPQLKGEYKGNASAEGYTLEDGTALNLSDKDQKWLGLKDTFKF

SEQ ID NO: 101 - DNA, 828 bp, Lactococcus lactis
  ORF coding a putative NAD-dependent epimerase/dehydratase family protein 2 of DSM 33139
atgaaaattttagtaactggtgcaaacggctatctggggcagggtattgtaaaggagcttctagataacgggcataatgttgtggctgcggattttaagaccacgtatgttgatgaccgagcagaaaagatagattgtgacttgttctcggtagaagaaccctatacatactttggtaaaccggatgctcttcttcatttggcatggagggatggatttgttcattactcggaaaaccatattgcggatttaccaaaacattatcatttcttgaagcaaatggttgaagctaatatcttcaagattagtgttatgggaacgatgcacgaaattggtttctttgaaggtagtattaatgaaaatactccttgccatccgatgagtctctatggcatcggcaaagatgctctgcgcaactgtgtggcgatgatgactaatggtaaacacacaaaatggcaatggttacgtggctattacatcgtcggacattctgagtttggatgttctattttttcaaaaattaaggcagcagaaaaagagggtaaaacagaatttccgtttaccatgggtcaaaatcagttcgattttatagattatgaagatttctgtaaacaggttgctgcagctgttggtcaggatgaaattaatggaattatcaatatctgttctggtaaaccggaaaagttggctgatcgtgtagaaaggtttattaaggaaaatggatacggtattaaattgaaatatggagcatttcctgatcgtccatacgattcaaaggccgtttggggagataataataagataagaaaaattatgcagaataattga

SEQ ID NO: 102 - protein, 275 aa, Lactococcus lactis
  33139_NAD-dependent epimerase/dehydratase family protein 2
MKILVTGANGYLGQGIVKELLDNGHNVVAADFKTTYVDDRAEKIDCDLFSVEEPYTYFGKPDALLHLAWRDGFVHYSENHIADLPKHYHFLKQMVEANIFKISVMGTMHEIGFFEGSINENTPCHPMSLYGIGKDALRNCVAMMTNGKHTKWQWLRGYYIVGHSEFGCSIFSKIKAAEKEGKTEFPFTMGQNQFDFIDYEDFCKQVAAAVGQDEINGIINICSGKPEKLADRVERFIKENGYGIKLKYGAFPDRPYDSKAVWGDNNKIRKIMQNN

SEQ ID NO: 103 - DNA, 912 bp, Lactococcus lactis
  ORF coding a putative dTDP-4-dehydrorhamnose reductase protein of DSM 33139
atgaagttctttgtaacaggtgttggtggccaacttggccatgatgtgatgaatgagctgctgaagcgtggccatgaaggtgttggttctgatattcaggaaaactacagcggggtggcagatgactctgcagtaacaaaagcaccttatgtggctctggatattactgataagaatgccgttgaaaaagtaattacagaagtaaatccggatgccgtaatccactgcgcagcatggactgctgttgatatggctgaggatgatgataaagtagcgaaagtccgtgcaatcaatacaggcggtactcagaacattgcggatgtctgcaagaaattggactgtaagatgacctatatcagcacggattatgtgtttgatggtcagggtacagagccctggcagccggactgcaaggattacaagccactgaatgtgtatggtcagacgaagctggaaggtgaactggctgtcagtcaaacgctggagaaatattttatcgttcgtatagcatgggtgtttggtctgaatggtaagaactttattaagaccatgctgaatgtcggcaagacgcacgatactgtccgcgtggttaatgatcagattggcacaccgacctatacatatgatttggctcgactgctcgttgatatgaatgaaaccaagaaatacggctattaccatgcgaccaacgagggcggttatatcagttggtatgatttcacgaaagaaatttatcgtcaggctggttataagacggaagtcctgccggtgaccacggcggagtatggcttgagcaaggcagctcgtccgttcaacagccgtctggataagagcaagctggtggaggctggattcactccgcttccaacatggcaggatgcactgagccgttatttgaaagaaatcgagtag

SEQ ID NO: 104 - protein, 303 aa, Lactococcus lactis
  33139_dTDP-4-dehydrorhamnose_reductase
MKFFVTGVGGQLGHDVMNELLKRGHEGVGSDIQENYSGVADDSAVTKAPYVALDITDKNAVEKVITEVNPDAVIHCAAWTAVDMAEDDDKVAKVRAINTGGTQNIADVCKKLDCKMTYISTDYVFDGQGTEPWQPDCKDYKPLNVYGQTKLEGELAVSQTLEKYFIVRIAWVFGLNGKNFIKTMLNVGKTHDTVRVVNDQIGTPTYTYDLARLLVDMNETKKYGYYHATNEGGYISWYDFTKEIYRQAGYKTEVLPVTTAEYGLSKAARPFNSRLDKSKLVEAGFTPLPTWQDALSRYLKEIE

SEQ ID NO: 105 - DNA, 903 bp, Lactococcus lactis
  ORF coding a putative nucleotidyltransferase protein of DSM 33139
atgaaaacaacattacttgtcatggctgctggtatcggtagccgcttcgaaacgggaattaagcagttggagccggtggatgcttctaatcatattatcatggattactcgattcatgatgcaatcgaggctggcttcaatcatgtggtatttattatccgtaaggatattgagaaagagttcaaagaggtcatcggtgatcgcattgcctctatttgctcttctcacaatataactgtggactacgctttccaggacattaacgatattccgggaactttaccggaaggccgtacaaaaccgtggggaaccggacaggccgtgcttgctgctaaaaatgtgattgataccccgtttattgtcattaatgctgatgattactatggcaaggaaggctttaaggctgtccatgagtatctggtaaatggcggaaagtcctgtatggctggctttgtgctgaagaatacgctgtctgataacggtggtgtaactcgtggtatctgcaagatggatgagcagtacaatctgactgaggttgttgagacaaagaatattgtgaagaccgcaactggagcagaagcagacggaaaagtgattgatgttgattctctggtatctatgaatatgtggggattaactcctgattttttggacatgctggagaaaggtttcaaagaatttttcgagaaagaagttccgggcaatcctttgaaagctgagtatctgatcccaatcctcatcggtgaactgctggagcagggcaagatgtctgtgaaggttctgaaaacgaacgatacctggtatggtatgacctatcatgaggatgtcgcagttgtaaaggacagcttcaaaaaaatgctagaaaacggcgtgtacaaggctgacttgttcagagatctctaa

SEQ ID NO: 106 - protein, 300 aa, Lactococcus lactis
  33139_nucleotidyltransferase
MKTTLLVMAAGIGSRFETGIKQLEPVDASNHIIMDYSIHDAIEAGFNHVVFIIRKDIEKEFKEVIGDRIASICSSHNITVDYAFQDINDIPGTLPEGRTKPWGTGQAVLAAKNVIDTPFIVINADDYYGKEGFKAVHEYLVNGGKSCMAGFVLKNTLSDNGGVTRGICKMDEQYNLTEVVETKNIVKTATGAEADGKVIDVDSLVSMNMWGLTPDFLDMLEKGFKEFFEKEVPGNPLKAEYLIPILIGELLEQGKMSVKVLKTNDTWYGMTYHEDVAVVKDSFKKMLENGVYKADLFRDL

SEQ ID NO: 107 - DNA, 345 bp, Lactococcus lactis
  ORF coding a putative acyltransferase 2 protein of DSM 33139
atgttttcacgacttgcttgtattaacgagatttctttaggaaataatgtacttacaggaccacatatttttatttgcgattataatcatgcatatgaagatataaatagacctatttctttacaaggaaatattggaaacgataataaggttattatagatgatgactgttggattgaaacaaatgttgtaatctgtggcaatgttcatattggaaaacatacggtaattggggcaaatgcttttgtcaataaggacattcctagctattgcgttgcggttggaaatccagcaaaggttgtcaaaaaatataattttgagacaggtgcatgggagaatgtataa

SEQ ID NO: 108 - protein, 114 aa, Lactococcus lactis
  33139_acyltransferase2
MFSRLACINEISLGNNVLTGPHIFICDYNHAYEDINRPISLQGNIGNDNKVIIDDDCWIETNVVICGNVHIGKHTVIGANAFVNKDIPSYCVAVGNPAKVVKKYNFETGAWENV

SEQ ID NO: 109 - DNA, 321 bp, Lactococcus lactis
  ORF coding a putative DUF1972 domain-containing protein of DSM 33139
ttggttcaaaatggaattccagcaaagtatggtggttttgagacttttgtagaaaaactaacggcacatcaaagtaataaaaaccttaagtatcatgttgcttgtttatcgaatggtatacaagaaaattttaatcataatgatgcagactgttttaatatttcaaagaaaaatattggaccagcaaacgccatttattatgatttggcagctttaaaacactcacttaaagaaattgaagaaaaaaattatatgggtgcaattatttatattttacttgccgcattggtccgtttattggtcactataaaaagcaaatga

SEQ ID NO: 110 - protein, 106 aa, Lactococcus lactis
  33139_DUF1972_domain-containing_protein
LVQNGIPAKYGGFETFVEKLTAHQSNKNLKYHVACLSNGIQENFNHNDADCFNISKKNIGPANAIYYDLAALKHSLKEIEEKNYMGAIIYILLAALVRLLVTIKSK

SEQ ID NO: 111 - DNA, 393 bp, Lactococcus lactis
  ORF coding a putative acyltransferase 1 protein of DSM 33139
atgtttggaataaaatcaagaatcagaaaatgtaaagatattataaattttaaattgaaaaataagggggtagtagttggaaaaaatattatattaagaaaccctcagtatatttcatgtggtaaaaatgtagttattggagatgaaagtaaattattatgttgggatagttatggagaagaacaatatagtaatttaccagaaatccaaataggcgataattttcatgcgacacgaaattttacaattcaatgcgctcaaaaagtggttattggaagagatgtattggtagcttcgaatgtctttattatagattataatcatggattaaacccattaaccaagtcgtatcttgaaaacccactaatacggggggggggtacttgtagatga

SEQ ID NO: 112 - protein, 130 aa, Lactococcus lactis
  33139_acyltransferase1
MFGIKSRIRKCKDIINFKLKNKGVVVGKNIILRNPQYISCGKNVVIGDESKLLCWDSYGEEQYSNLPEIQIGDNFHATRNFTIQCAQKVVIGRDVLVASNVFIIDYNHGLNPLTKSYLENPLIRGGGTCR

SEQ ID NO: 113 - DNA, 318 bp, Lactococcus lactis; identical to SEQ ID NO: 1
  ORF of the epsR gene of DSM 33141

SEQ ID NO: 114 - protein, 105 aa, Lactococcus lactis; identical to SEQ ID NO: 2
  33141_epsR

SEQ ID NO: 115 - DNA, 768 bp, Lactococcus lactis
  ORF of the epsX gene of DSM 33141
atgatgaaaaaaggaatttttgtaattactatagtgatatctatagcagtgataattggaggtttttatagttataattctaggataaataatctttcaaaagctgataaaggaaaagaagttgtaaaaaatagcagtgaaaaaaatcagatagaccttacctataaaaagtattataaaaatttaccaaaatcagttcaaaataaaatagatgatatttcatcaaaaaataaagaagttactttaacttgtatttggcaatctgattcagttatttctgaacaatttcaacaaaacttacaaaaatattatggaaataagttttggaacatcaaaaatatcacttacaatggcgaaacaagtgaacaattattggctgaaaaagttgaaaaccaagtattagccactaatcctgatgttgttttatatgaagctccactttttaatgataaccaaaacattgaagcaacagcctcacggactagtaatgagcaacttataacaaatttggctagtacaggagcagaggtgatagttcaaccctctccaccgatttatggtggtgttgtataccccgtacaagaagaacaatttaaacaatctttatctacaaaatatccctatatagactactgggctagttacccagacaaaaattctgatgaaatgaaggggctgttttctgatgatggagtatatagaacattaaatgattcggggaataaggtttggctagattatattactaaatattttacagcaaactaa

SEQ ID NO: 116 - protein, 255 aa, Lactococcus lactis
  33141_epsX
MMKKGIFVITIVISIAVIIGGFYSYNSRINNLSKADKGKEVVKNSSEKNQIDLTYKKYYKNLPKSVQNKIDDISSKNKEVTLTCIWQSDSVISEQFQQNLQKYYGNKFWNIKNITYNGETSEQLLAEKVENQVLATNPDVVLYEAPLFNDNQNIEATASRTSNEQLITNLASTGAEVIVQPSPPIYGGVVYPVQEEQFKQSLSTKYPYIDYWASYPDKNSDEMKGLFSDDGVYRTLNDSGNKVWLDYITKYFTAN

SEQ ID NO: 117 - DNA, 765 bp, Lactococcus lactis
  ORF of the epsB gene of DSM 33141
atgattgatattcattgccatattttaccggggatagatgatggagctaaaacttctgaagatactttgaaaatgctgaaatcagcaattgatgaagggataacaaccatcactgccactcctcatcataatcctcaatttaataatgagtcaccccttattttaaaaaaagttaaggaagttcaaaatatcattgacgagcaccaattaccaattgaagttttgcctggacaagaggttagaatatgtggtgatttattaaaagaattttctgaaggaaagttactgacagcagcgggcacttcaagttatatattgattgaatttccatcaaatcatgtgccagcttatgctaaagaacttttttataatattcaattggagggacttcaacctattttggtccaccctgagcgtaatagtggaatcattgagaaccctgatatattatttgattttattgaacaaggagtactaagtcagataacagcttcaagtatcactggtcattttggtaaaaaaatacagaagttatcatttaaaatgatagaaaaccatcttacgcatcttgttgcatcagatgcgcataatgtgacgtcacgagcatttaagatgaaggaagcatttgaaattattgaagatagttatggttctggtgtatcacgaatgtttcaaaataatgcagagtcagtgatcttaaacgaaagtttttatcaagaaaaaccaacaaagatcaaaacaaagaaatttttaggattattttaa

SEQ ID NO: 118 - protein, 254 aa, Lactococcus lactis
  33141_epsB
MIDIHCHILPGIDDGAKTSEDTLKMLKSAIDEGITTITATPHHNPQFNNESPLILKKVKEVQNIIDEHQLPIEVLPGQEVRICGDLLKEFSEGKLLTAAGTSSYILIEFPSNHVPAYAKELFYNIQLEGLQPILVHPERNSGIIENPDILFDFIEQGVLSQITASSITGHFGKKIQKLSFKMIENHLTHLVASDAHNVTSRAFKMKEAFEIIEDSYGSGVSRMFQNNAESVILNESFYQEKPTKIKTKKFLGLF

SEQ ID NO: 119 - DNA, 696 bp, Lactococcus lactis
  ORF of the epsD gene of DSM 33141
atggctaaaaataaaagaagcatagacaataatcgttatattatcaccagtgtcaatccccaatcacctatttccgaacaatatcgtacgattcgtacgaccattgattttaaaatggcggatcaaggaattaaaagttttctagtaacatcttcagaagcagctgcaggtaaatcaaccgtaagtgctaatatagctgttgcttttgcacaacaaggtaaaaaagtacttttaattgatggcgatcttcgtaaaccgactgctaacattacttttaaagtacaaaatagagtaggattaaccaatattttaatgcatcaatcttcgattgaagatgccatacaagggacaagactttctgaaaatcttaaaataattacctctggtccaattccacctaatccatcggaattattagcatctagtgcaatgaagaatttgattgactctgtgtccgatttctatgatgttattttgattgatactacacctctctttgcagttactgatgctcaaattttgagtatttatgcaggaggagtggttcttgttgtacgtgccaatgaaacaaaaaaagagagtttagcaaaaacaaaaaaaatactggaacaacttaatgcaaatatattaggagttgttttgcatgggctagactcttctgactcaccgtcgtattcctactacggagtagagtaa

SEQ ID NO: 120 - protein, 231 aa, Lactococcus lactis
  33141_epsD
MAKNKRSIDNNRYIITSVNPQSPISEQYRTIRTTIDFKMADQGIKSFLVTSSEAAAGKSTVSANIAVAFAQQGKKVLLIDGDLRKPTANITFKVQNRVGLTNILMHQSSIEDAIQGTRLSENLKIITSGPIPPNPSELLASSAMKNLIDSVSDFYDVILIDTTPLFAVTDAQILSIYAGGVVLVVRANETKKESLAKTKKILEQLNANILGVVLHGLDSSDSPSYSYYGVE

SEQ ID NO: 121 - DNA, 1164 bp, Lactococcus lactis
  ORF coding a putative GT1 protein of DSM 33141
ttgcacttaaaagaggaagttatgaataaaaggaaaaataataattctccacttaaaattgcagttcttggacataagacaattccgagtcgccaaggtggaattgaaattgtagttgaagaattaacagttcgtatggcaaaactgggacataaaataacagtatataaccgtagcggacatcatgtaagtggtaaagaatttgatggaaagaagctaaaagaatataaaggaatccgaatgaaatatgtaccgacaatagataaaaaaggattagcagcgatgagtgcctcttttttcgcagcggtggtagcggcgtttggaaaatatgatgtggtacattttcatgcagaagggccgtgtgcaatgttatggttgccaaaattattcggaaagcgatgtatagctacggtgcatggattagatcatcagagagcaaaatggggtaaattagccagtacatatattatgttgggagaaaaatgtgcggttagatttgctgacgaaattattgtgttaagtgaaggggttcagaaatatttccttgatacatatgggagagaaacccgttttatacctaatggtgtaaacagaccaattatccgaaatgctgaaattattaagaataaatttggtttagaaaaggatagctacatcctctttttgggtagattagttccagaaaaagggcttagatatttgatagaagcctttagacaggtagatactgagaaaaaaatggttattgctggtggaagttcagatacagatgaatttacaaaagaattaaaagaactggcaaaagatgattcaagaattatttttactggatttgttcagggaaaagagttagatgaactttatagtaatgcttatgtatatactttgccgagtgatctggaaggaatgcctcttagtttattagaggcaatgagttacggaaattgctgcttggtgtctgacatagatgaatgtgcatctgttgtagaagataaagcatttatttttaagaaaagtgatgtggcagatttgcaaagcaaattgcagaaagcttgtgatgataaagaacaagtacaaaaatataaagatgaagctgcagattatatttgccaaaaatataattgggatgatgttgtagaaaaaacactagaattgtatcaataa

SEQ ID NO: 122 - protein, 387 aa, Lactococcus lactis
  33141_GT1
LHLKEEVMNKRKNNNSPLKIAVLGHKTIPSRQGGIEIVVEELTVRMAKLGHKITVYNRSGHHVSGKEFDGKKLKEYKGIRMKYVPTIDKKGLAAMSASFFAAVVAAFGKYDVVHFHAEGPCAMLWLPKLFGKRCIATVHGLDHQRAKWGKLASTYIMLGEKCAVRFADEIIVLSEGVQKYFLDTYGRETRFIPNGVNRPIIRNAEIIKNKFGLEKDSYILFLGRLVPEKGLRYLIEAFRQVDTEKKMVIAGGSSDTDEFTKELKELAKDDSRIIFTGFVQGKELDELYSNAYVYTLPSDLEGMPLSLLEAMSYGNCCLVSDIDECASVVEDKAFIFKKSDVADLQSKLQKACDDKEQVQKYKDEAADYICQKYNWDDVVEKTLELYQ

SEQ ID NO: 123 - DNA, 1257 bp, Lactococcus lactis
  ORF of a putative wzy gene of DSM 33141
atgataataaagaagaaagataaatattatattatgctatttttattatttgttgttgatttaaattttttaaatttaatagatactgcaacatttaatatcggaggaatttattatacagacattgtatttctattaaatatttctgtatttttatatcagattataaaggataaatttcaaattgcaaaaaatataagtattatctatgtattgtgtgtaattatattaatggtattgtcagcttgtgcaggtcacataacatataatcaatcaatagtggctggaatagttgcacagcgagaatgggtgtcatggatgttattgatttatccattatctaggtggattcaattacaaaaactttctgttgaaggaataaaaaaatgtataattaatttatgcaatatatatgcgtttatttgtataatacaatatttattatatgatgtagttcagtttacatatactatggttaacaatagatatggaagtgttagattatatttttatacgatttttttctgttttgctataggtatagttattgatgacttgattagtggatcaaaacgtagtttgaagaattctacaatgcaatggataaaattgctcgcttatttatttataattgtatttattacaaagggaagaatgcaaacaatttctttattatgtgctattatagtttgctcattaattagaagagatatgcggatagaaaaaaaaataatactctgtttattaatagttgtgctgacatatgtttttatgaactctacaatgggacaggatatattgcatgccattatgggtacaagtgaaaatgatactttatctgttagagattcaggaagggtatattatttaggattatatacacagtcatggaaaagaatactttttggatgtggatttgcaaattctaataatagttatgctataacgatacttaatcctttgtggcaggaatatggaagtgcgagatactatttggaagacgtaggaattttatcaccattaataaaatatggattggtaggaatagtattttggattggggttgtaattaaaaatatatcactttcatataaaatttataataaatctggagaaatggtatatttacagtttttatttatggatttaattgcttgtgcgacactggtacctacaatgtttaatacaacaatcctttttccgcttattacaatattaatattatttagagcaaaggaattgcagataataagataa

SEQ ID NO: 124 - protein, 418 aa, Lactococcus lactis
  33141_wzy
MIIKKKDKYYIMLFLLFVVDLNFLNLIDTATFNIGGIYYTDIVFLLNISVFLYQIIKDKFQIAKNISIIYVLCVIILMVLSACAGHITYNQSIVAGIVAQREWVSWMLLIYPLSRWIQLQKLSVEGIKKCIINLCNIYAFICIIQYLLYDVVQFTYTMVNNRYGSVRLYFYTIFFCFAIGIVIDDLISGSKRSLKNSTMQWIKLLAYLFIIVFITKGRMQTISLLCAIIVCSLIRRDMRIEKKIILCLLIVVLTYVFMNSTMGQDILHAIMGTSENDTLSVRDSGRVYYLGLYTQSWKRILFGCGFANSNNSYAITILNPLWQEYGSARYYLEDVGILSPLIKYGLVGIVFWIGVVIKNISLSYKIYNKSGEMVYLQFLFMDLIACATLVPTMFNTTILFPLITILILFRAKELQIIR

SEQ ID NO: 125 - DNA, 990 bp, Lactococcus lactis
  ORF coding a putative GT2 protein of DSM 33141
atggaggttattaataaggaacaccctcttattagtgttattgttcctatatataaagtcgaaaaatatctgggtaaatgtattgagagtattattgcccaggaatattcaaatatcgaaattattttagtggatgatggatctccagataattgtggtaaaatatgtgatgattttgctactaaagatgctcggattaaagttatccataaagaaaatggaggactttcttcagcaagaaatgctggaattgatattgcaacaggtgagtatttgggctttgtagatagtgacgattcgattgagccgtttatgtataaaaaattgatttcttcaattatagaaaacaaaaccaaattagcagtatgtgcggtaaattatgtatttgaaaatggtaagattcttacgaaatctaatttaggtgagaattgtacatttgatttttatcaagcaatgatagaaatgaattctcatagaatttttgatatgggtgcatggagcaagttatatcatagagatttattttttgatttgcgctttccggaagggaaattaagtgaagattattatattatgtataaaatctttgaccgagcgcaaaaaattagttatgtctcaacaccgtgttataattatttacaacgacagaatagcattacacataatgttagaattaatcacgatcatgaatatgctgcaaaggaacaaatggaatatttagaaaagaaatatccagaattaaaggtcttgggacatacagcttatgcttcagcggcattaactgtatatgactcatatattaaaaatgccgttagctgtcctcaaaaggatataaagcattttaaaagtgtagttcgggaaaataggcagtatattaagaatgcagattttttgtcaaaaagcaaaaaagttcaatttcaattattttcaattagtacagctatgtacaatattgtatttaaggtgtatagaaaaattaagagggtttag

SEQ ID NO: 126 - protein, 329 aa, Lactococcus lactis
  33141_GT2
MEVINKEHPLISVIVPIYKVEKYLGKCIESIIAQEYSNIEIILVDDGSPDNCGKICDDFATKDARIKVIHKENGGLSSARNAGIDIATGEYLGFVDSDDSIEPFMYKKLISSIIENKTKLAVCAVNYVFENGKILTKSNLGENCTFDFYQAMIEMNSHRIFDMGAWSKLYHRDLFFDLRFPEGKLSEDYYIMYKIFDRAQKISYVSTPCYNYLQRQNSITHNVRINHDHEYAAKEQMEYLEKKYPELKVLGHTAYASAALTVYDSYIKNAVSCPQKDIKHFKSVVRENRQYIKNADFLSKSKKVQFQLFSISTAMYNIVFKVYRKIKRV

SEQ ID NO: 127 - DNA, 1083 bp, Lactococcus lactis
  ORF coding a putative GT3 protein of DSM 33141
atgcagattttttgtcaaaaagcaaaaaagttcaatttcaattattttcaattagtacagctatgtacaatattgtatttaaggtgtatagaaaaattaagagggtttagtatggataaattagtgagcgttattattccagtgtacaatacaggaaatattataaaaaagtgtattaagagtatattgaatagtgattatagtaatatagaaataataattattgatgatggatccgataaagaaactgtagatatatgtaacaacttagaaaaagaagaaaaaattcatgtgattcatcaagaaaatgctggtgtaagtagcgctcgcaataaaggaatatatcacgctcaaggggagtttattacttttgtagatgcagatgacacaatagattcaaacctaattagtgttcttgtaaatagttgcattgaaaaaaatgccgatatggcaatttgcggttatagagaatggtatgatgataagcattgtacagaattccggtgcacagattcaattacgatattaaaagaaaaggaaattttaaaagactttttttctacaaataatattgcatggaatgtgtggggaaaaatatataagaaaagtttggttggcgatacaagattcatagtaggtaaaaggactggcgaagacatgtattttgtatatgaaatcttaaaaaaagctcatacattggtaatgaataataaggcattgtacaattatgaaaaacaagataattctgcaatggcagattcaaattgtatgaaattttttgatacttatgaattagttaataaagtatttgaagatgaagcattagataacgagctgaaaaatgcgcaattaaatttttatataaaaagtgagttgtggttttttcgtttcataaatgcaaaagataaggataatgagaataaaagtgaaataaagaaagcaagaaaaaaattcttggacaatattaagaaaaaagaagcaagatgttctggaagaacaaaaatagaattaattttattgcgatatttttatcctgtttttagagtgatctctcttatatggggggcaaaaaaggggatttag

SEQ ID NO: 128 - protein, 360 aa, Lactococcus lactis
  33141_GT3
MQIFCQKAKKFNFNYFQLVQLCTILYLRCIEKLRGFSMDKLVSVIIPVYNTGNIIKKCIKSILNSDYSNIEIIIIDDGSDKETVDICNNLEKEEKIHVIHQENAGVSSARNKGIYHAQGEFITFVDADDTIDSNLISVLVNSCIEKNADMAICGYREWYDDKHCTEFRCTDSITILKEKEILKDFFSTNNIAWNVWGKIYKKSLVGDTRFIVGKRTGEDMYFVYEILKKAHTLVMNNKALYNYEKQDNSAMADSNCMKFFDTYELVNKVFEDEALDNELKNAQLNFYIKSELWFFRFINAKDKDNENKSEIKKARKKFLDNIKKKEARCSGRTKIELILLRYFYPVFRVISLIWGAKKGI

SEQ ID NO: 129 - DNA, 1629 bp, Lactococcus lactis
  ORF of a putative wzx gene of DSM 33141
atgatgattatgttgaatatggacagaattatcgagaaaaggtatggaatcagattcaagatttttcaaacacaatttctaatatttttgaggtggataatgaaactcgatagaacaaacaatgcctttagaaatatgaaatttggtatggttaacaaaattgtaactttatttttgccatttatcataagaactgtattaattaaaacaataggtatggaatatgcaggactaaattcattattttcgtcaattttgcaggtgcttaatttgtcggaattgggatttagtagtgcggtagtatatagtatgtatcgcacgattgcagaaaatgatgatcgacaagttggtgcgctactattattttataaaaaagtatatcggattattggtttagtagttttatcagttggattgattataatgccatttttaccgaaattagtagaaggtggttatccaccagatataaatgtttatattttgtatctgatttatctattagatacggttgtgagttattttttatttgcttataaaagtgccatattaaatgctcatcaaagagtagatattgtaagtaatattttaacaattactcaaggtgcaatgaatttggtacagattataatgctaatagcattcaaaaattattactgctatattatatggatgcctttatttacaatcttaaataatattatgacagcctactgtgtaaataagctatttccacaatatcattgtgaaggaaagatttctagagatcaattgtctgatatgaaatataagataagtggtcttatggtgaataaattgtgtttaacaacaagaaatactttagatagtgtatttatatctgcatttatgggacttacagtcagtgctatttacggaaactattattatatattgaatgccgttataggcttgatttcaattgtttcaagtgcgatgcttgccggggttggaaatagtatcgaaacagaaagtgtagaaaaaaattataatgatttgaaaaaattcaattttttatatatgtggcttagcggatggtgtgctatctgcatgttatgtttgacacaaccgtttatgacaatttggatgggaaaagacaatctattcccatttggtgttgttgttcttatttgcatatatttttatgtgctaaaaatgggagatatgcgaggcttatattcagatgcagctggattgtggtggcagaatagatatagagcgataagtgaatctatattaaaccttgtattaaattatgttttagtgcaggtatggggaatttatggaattattattgctacattaatatcattattttttattaattttttgggtggaagtggaattgtttttaaacattactttaaaaatggtaaatttatagaatttttgaaatatcattttttctatatgcttataaccgtaataaatgcttccatatgtgtgtttctaacaaattttgttaaatatgaaggaattattggattggggcttagagcaataatatgtgtaattatccctaatgtaatatatgcattggtatatttgaatatatcagaattaaggcaacagtcaaaatgggtattaagtaagttaaaggtaaggagatga

SEQ ID NO: 130 - protein, 542 aa, Lactococcus lactis
  33141_wzx
MMIMLNMDRIIEKRYGIRFKIFQTQFLIFLRWIMKLDRTNNAFRNMKFGMVNKIVTLFLPFIIRTVLIKTIGMEYAGLNSLFSSILQVLNLSELGFSSAVVYSMYRTIAENDDRQVGALLLFYKKVYRIIGLVVLSVGLIIMPFLPKLVEGGYPPDINVYILYLIYLLDTVVSYFLFAYKSAILNAHQRVDIVSNILTITQGAMNLVQIIMLIAFKNYYCYIIWMPLFTILNNIMTAYCVNKLFPQYHCEGKISRDQLSDMKYKISGLMVNKLCLTTRNTLDSVFISAFMGLTVSAIYGNYYYILNAVIGLISIVSSAMLAGVGNSIETESVEKNYNDLKKFNFLYMWLSGWCAICMLCLTQPFMTIWMGKDNLFPFGVVVLICIYFYVLKMGDMRGLYSDAAGLWWQNRYRAISESILNLVLNYVLVQVWGIYGIIIATLISLFFINFLGGSGIVFKHYFKNGKFIEFLKYHFFYMLITVINASICVFLTNFVKYEGIIGLGLRAIICVIIPNVIYALVYLNISELRQQSKWVLSKLKVRR

SEQ ID NO: 131 - DNA, 915 bp, Lactococcus lactis
  ORF of the epsL gene of DSM 33141
ttggaggaaaaattggaacgaaaaaaaaagaaaaaaaagaatatttgggttataattatacctatcttaatttttattacccttataggagcaggggcttatgccttaagaaattcacttattcctactgatcatacgaaaacaaatagttcggatcaaccgaccaaaacttcggcctctaacggttatgtagagcaaaaaggggaagaagctgctgtgggtagtatagcacttgtagatgatgctggtgtaccagaatgggttaaagttccctcaagggtaaatctagataaatttactgatttatccacgaataatatcactatttatcgaattaacaatccggaagtcttaaaaacagttaccaatcgtacagatcaacggatgaaaatgtcagaagttatagctaagtatcctaatgctttgattatgaatgcttccgcatttgatatgcagacaggacaagtagctggatttcaaattaataatggaaagttgattcaagactggagcccaggtacaacgactcaatatgcttttgttattaacaaagatggttcgtgcaaaatttatgattcaagtacacctgcttcaactattattaaaaacggaggacaacaagcctatgattttggtactgcaattatccgtgatggtaaaattcaaccaagtgatggctcagtagattggaagatccatatttttattgcgaatgataaagataataatctctatgctatcttgagtgatacaaatgcaggctatgataatataatgaaatcagtgtcaaatttgaagctccaaaatatgttattacttgatagtggtggctcaagtcaactatctgtcaatggtaaaacgattgttgctagtcaagatgatcgagccgtaccggattatattgtaatgaaataa

SEQ ID NO: 132 - protein, 304 aa, Lactococcus lactis
  33141_epsL
LEEKLERKKKKKKNIWVIIIPILIFITLIGAGAYALRNSLIPTDHTKTNSSDQPTKTSASNGYVEQKGEEAAVGSIALVDDAGVPEWVKVPSRVNLDKFTDLSTNNITIYRINNPEVLKTVTNRTDQRMKMSEVIAKYPNALIMNASAFDMQTGQVAGFQINNGKLIQDWSPGTTTQYAFVINKDGSCKIYDSSTPASTIIKNGGQQAYDFGTAIIRDGKIQPSDGSVDWKIHIFIANDKDNNLYAILSDTNAGYDNIMKSVSNLKLQNMLLLDSGGSSQLSVNGKTIVASQDDRAVPDYIVMK

SEQ ID NO: 133 - DNA, 924 bp, Lactococcus lactis
  ORF coding a putative LytR family transcriptional regulator protein of DSM 33141
atgtatatatatggagataccatgaatcaaaaaaagaggcgtcattatcgtaagaaaaaacacacagtactaaaagttatttcaattatttttgtattagtaattattgctgttgcttctatagcctacgccgcttatagaaatgttgaatcaacattttcaacatcatatgaaaatttccctaaaacaacaagtatcgacttaaaaaagtctaaaacattcaccacacttatcattgcaactggtaaaaataattctaaaaatacagcttatgctactgttttagcttcaacgaatgtaaagacaaatcaaactactttcatgaatttcccagtttttgcgacaatgcctaatcaaaaaacaatcactgaagtttacaatacgaatggagatgatggaattttccagatagttaaagacctattgaatgtgtccattaacaaagtaattcagattgatgttaataaaatgggatcacttgtacaggccactggtggaatcaccatgcaaaatccaaaggcattcaatgctgaaggttatgagtttaaacaaggaactgttaatttacaaactgctgatcaagtccaagcctatatgacacaaattgacgatactgatttggatgcttcaatcactcgaattcaaaatgtctcaatggaactctacggaaatattcaaaaaattgctcatatgaaaaaacttgaaagtttcaattactatcgagaaattctctatgctttttcaaacactgttaaaaccaatataagtttcaatgatgctaaaacgatcgttttgagctacaataaggctctaaagaataccagcaagctcaatctacatacaacagatgaaaatggagctaaggtcgtttctcaaacagaattagactcagtcaaaaccctttttgaaaaatctctaaaataa

SEQ ID NO: 134 - protein, 307 aa, Lactococcus lactis
  33141_lytR
MYIYGDTMNQKKRRHYRKKKHTVLKVISIIFVLVIIAVASIAYAAYRNVESTFSTSYENFPKTTSIDLKKSKTFTTLIIATGKNNSKNTAYATVLASTNVKTNQTTFMNFPVFATMPNQKTITEVYNTNGDDGIFQIVKDLLNVSINKVIQIDVNKMGSLVQATGGITMQNPKAFNAEGYEFKQGTVNLQTADQVQAYMTQIDDTDLDASITRIQNVSMELYGNIQKIAHMKKLESFNYYREILYAFSNTVKTNISFNDAKTIVLSYNKALKNTSKLNLHTTDENGAKVVSQTELDSVKTLFEKSLK

SEQ ID NO: 135 - DNA, 1296 bp, Lactococcus lactis
  ORF coding a putative nucleotide sugar dehydrogenase protein of DSM 33141
ttgaaaattaagatagtatatttggtaaagagaagaggaataaatatgagtcaagagtataaaatagctgttgctggaactggatatgttggattatcaatcgctacacttttatcacaaaatcatcgggtggttgctgtagacattgtaaaagagaaggttgatttgatcaataaaagaaagagtccaattcaagatgaatatattgaaaaatatttgtcagagaaaaagttaaatttagaagctacattagatgcagaatatgcctacaaggatgcagattttgttgtaattgcagcacctacaaattatgatagcaaaacacaatattttgatacttcagcagttgaagcagttataaacatggtaactaaactaaattctaatgcggtaatggttattaaatctacaattccagttggatatacaagagaaattcgtaaaaaaacagggaataataatataatgtttagtccagagtttcttagagaaagtaaggcattatatgataatttgtatccatcgcgtattattgtgggaactgatttacacgatgagaaattaattgaagctgcccatatctttgcagaattattgaaagaaggggctattaaggaaaatattgacacactttttatgggatttacggaagcagaagcagttaaattgtttgcaaatacatatttagctttgcgagtagcatattttaatgaattggatacatatgcagaaagtaaaaatttgaatacaaaacaaattatagaaggtgtttgcttagatccacgtattggtacacattataataatccatctttcggatatggtggatactgtttacctaaagatacaaaacagttattggctaattatgccgatgttccagaaaatctaattgaagcgattgtggaaagcaatcatacacgtaaagattttattgctagtcaagttttaaaaattgcaggatattacaattatgaagatgatatagagtatgataaaaatcaagaaaaaaaagttgtaataggtgtttatagattaacaatgaaatcaaattctgataattttcgccagtctagcatacaaggtataatgaagcgaattaaagcaaaaggtgcagaagttgttatttttgagccaacattagaaaatggaagtactttctttggctcaaaaattgtaaataatttaaaacaatttaaagaacaaagtcaagcgattatagctaatagatatgattcttgtctggacgatgtaaaagaaaaagtatataccagagatttgtttagaagagattaa

SEQ ID NO: 136 - protein, 431 aa, Lactococcus lactis
  33141_nucleotide_sugar_dehydrogenase
LKIKIVYLVKRRGINMSQEYKIAVAGTGYVGLSIATLLSQNHRVVAVDIVKEKVDLINKRKSPIQDEYIEKYLSEKKLNLEATLDAEYAYKDADFVVIAAPTNYDSKTQYFDTSAVEAVINMVTKLNSNAVMVIKSTIPVGYTREIRKKTGNNNIMFSPEFLRESKALYDNLYPSRIIVGTDLHDEKLIEAAHIFAELLKEGAIKENIDTLFMGFTEAEAVKLFANTYLALRVAYFNELDTYAESKNLNTKQIIEGVCLDPRIGTHYNNPSFGYGGYCLPKDTKQLLANYADVPENLIEAIVESNHTRKDFIASQVLKIAGYYNYEDDIEYDKNQEKKVVIGVYRLTMKSNSDNFRQSSIQGIMKRIKAKGAEVVIFEPTLENGSTFFGSKIVNNLKQFKEQSQAIIANRYDSCLDDVKEKVYTRDLFRRD

SEQ ID NO: 137 - DNA, 780 bp, Lactococcus lactis
  ORF of the epsC gene of DSM 33141
atgcaggaaacacaggaacaaacgattgatttaagagggatttttaaaattattcgcaaaaggttaggtttaatattatttagtgctttaatagtcacaatattagggagcatctacacattttttatagcctccccagtttacacagcctcaactcaacttgtcgttaaactaccaaattcggataattcagcagcctacgctggacaagtgaccgggaatattcagatggcgaacacaattaaccaagttattgttagtccagtcattttagataaagttcaaagtaatttaaatctatctgatgactctttccaaaaacaagttacagcagcaaatcaaacaaattcacaagttattacgcttactgttaaatattctaatccttacattgcacaaaagattgcagacgagactgctaaaatttttagttcagacgcagcaaaactattgaatgttactaacgttaatattctatccaaagcaaaagttcaaacaacacccattagtcctaaacctaaattgtatttagcgatatctgttatagccggactagttttaggtttagccattgctttattgaaggaatcgtttgataacaaaattaataaagaagaagatattgaagctctggggctaacggttcttggtgtaacaacctatgctcaaatgagtgattttaataagaatacaaataaaaatggcacgcaatcgggaactaagtcaagtccgcctagcgaccatgaagtaaatagatcatcaaaaaggaataaaagatag

SEQ ID NO: 138 - protein, 259 aa, Lactococcus lactis
  33141_epsC
MQETQEQTIDLRGIFKIIRKRLGLILFSALIVTILGSIYTFFIASPVYTASTQLVVKLPNSDNSAAYAGQVTGNIQMANTINQVIVSPVILDKVQSNLNLSDDSFQKQVTAANQTNSQVITLTVKYSNPYIAQKIADETAKIFSSDAAKLLNVTNVNILSKAKVQTTPISPKPKLYLAISVIAGLVLGLAIALLKESFDNKINKEEDIEALGLTVLGVTTYAQMSDFNKNTNKNGTQSGTKSSPPSDHEVNRSSKRNKR

SEQ ID NO: 139 - DNA, 459 bp, Lactococcus lactis
  ORF of the epsE1 gene of DSM 33141
atggaagtttttgaggatgcctcagcacctgaatcggaagaacacaaattagtagtattaaaaaatttttcttatggagagctaattataaaaagagcaattgatatcctaggaggattagcgggttcagttttatttcttattgcggctgcattgctttatgtcccttacaaaatgagctcaaaaaaagatcaagggccaatgttctataaacaaaaacggtatggaaaaaatggtaaaattttttatattttgaaatttagaacaatgattcttaatgctgagcagtatttagagctacatccagaagttaaagccgcctatcatgccaatggcaataaactagaaaatgatccgcgtgtgacgaagattggttcatttattagacaacactcaattgatgaattaccacaatttatcaatgtccttaaaggagtcggcggtatagggcacctctaa

SEQ ID NO: 140 - protein, 152 aa, Lactococcus lactis
  33141_epsE1
MEVFEDASAPESEEHKLVVLKNFSYGELIIKRAIDILGGLAGSVLFLIAAALLYVPYKMSSKKDQGPMFYKQKRYGKNGKIFYILKFRTMILNAEQYLELHPEVKAAYHANGNKLENDPRVTKIGSFIRQHSIDELPQFINVLKGVGGIGHL

SEQ ID NO: 141 - DNA, 1476 bp, Lactococcus lactis
  ORF of the epsE2 gene of DSM 33141
atggaaggggaaagaaaaaaatctatgtatagaaaagattctgaaggatggttaaagcacgcagactttatagtcttagatatgatctgtttgcaattagcgtatgttctggcatatgcaattagcggatatggatttaatccatatgaaacaattatttatcgcaatatggcagttttccttgaattggcagatctggttatgatttttgcatatggcaccatgaaaagcgtgttaaagagaggatactatcgtgattttgctgttacgttaaatcatgcgattatggtaggtgccttagcggttttatatttattcctgcttcaggaagggcaggacttttcaagattaacattgatgctgaccataataatttatttagtaatgacgtatattgtcagagaactttggaaaaaacttctgcgaaaacagatgaaggatggcggagaacgtaaactactgattgtaacatcagaagatgtggctgaacaagtagtgttaagtatgcaggaaaataattatgccagattttcattggctggtgtagctgtaattgatgcggactggactggaagagaaattcatggagttccggtagttgccaacgaagagactgcagcaatgtatgtatgtcaggaatggattgacgaagttctggttgttgtttcagaagttcttccgtatccggcagagttaattgagcagttatcagagacaggagtaaccattcatcttaatcttgcaaagattacaagtgtgccaggaaaaaaacaatttgtggaaaaagttggtaattacacagttcttacgacaagtattaattatgcatcaaccagacagttaatgttaaaacgattgatggatattgcgggtggattagttggatgtatttttaccggaatcatttgtatttttgtcggaccggcaatttatattgcatcaccgggaccaattttctttgctcaggaacgagtaggaaagaatggaaagaaatttaaaatgtacaagttccgcagtatgtatatggatgcagaagagcgtaaggcagagcttatgaaagataacaaacttggagatggaaagatgtttaaactggactttgatcctcgtgttatcggaaataagatacttccagatgggacacataagacaggaatcagtgattttatcagacgaacaagtttagatgaatttccgcaattctttaacgtattacgaggcgatatgtcgattataggtactcgcccacccttgatttcagaaacgaatctgtatgagcttcaccatcgtgcaaggctggcaattaagccgggaatcactggcatgtggcaggtaagtggacgaagtgatattactgattttgaagaagtagttcgtcttgataaagagtatatcacaaactggaacattgggctagatataaaaatattatttaaaacgatattggtagtctttaagaaagatggatcaatgtaa

SEQ ID NO: 142 - protein, 491 aa, Lactococcus lactis
  33141_epsE2
MEGERKKSMYRKDSEGWLKHADFIVLDMICLQLAYVLAYAISGYGFNPYETIIYRNMAVFLELADLVMIFAYGTMKSVLKRGYYRDFAVTLNHAIMVGALAVLYLFLLQEGQDFSRLTLMLTIIIYLVMTYIVRELWKKLLRKQMKDGGERKLLIVTSEDVAEQVVLSMQENNYARFSLAGVAVIDADWTGREIHGVPVVANEETAAMYVCQEWIDEVLVVVSEVLPYPAELIEQLSETGVTIHLNLAKITSVPGKKQFVEKVGNYTVLTTSINYASTRQLMLKRLMDIAGGLVGCIFTGIICIFVGPAIYIASPGPIFFAQERVGKNGKKFKMYKFRSMYMDAEERKAELMKDNKLGDGKMFKLDFDPRVIGNKILPDGTHKTGISDFIRRTSLDEFPQFFNVLRGDMSIIGTRPPLISETNLYELHHRARLAIKPGITGMWQVSGRSDITDFEEVVRLDKEYITNWNIGLDIKILFKTILVVFKKDGSM

SEQ ID NO: 143 - DNA, 768 bp, Lactococcus lactis
  ORF coding a putative GT4 protein of DSM 33141
atgaaaattttattgcttataaattggaaaataaaatattgtgaccatataccagaggatttgcaaccttcagattatgattgtcctcaggaggtatattggttttttaaatactttaaagataaaccagaggtagatgttgttgatattagtgcaccaaaatttattgaaaagatagaaaataaagttcggtttcatttttttcaaacttttaaaatattatttaaattgaataaatatgatttgatttttgtttgtggatctaatagtgcaatgctgttgtgtgcattaaaaagagtgtttcacataaaaacacctccaatattggatgttgatataagttcatttcatcaagcatatacttcaggattgattcatagattatcacagttttctagtagggcttttgattatatggtatatcatactagttcacaatatgattattatatggaatattttccatggttaaaagataagtgcaaatttgttccatttggtgttgattataattattggaaattaaaaacgtatgaagatatacctgaaaaggatcaatatattgtttgtgtaggatatagaaaaagagattggaatacattactaaaagcgtttgataaaatagatattccagaaaaattatatcttattggaaatccagatattaaatgtgataatccaaaagtaaaagtgcttccttttatcccagttgcagcagatggctttgggagttccggtattagcagcagatgtttcagctatacgtga

SEQ ID NO: 144 - protein, 255 aa, Lactococcus lactis
  33141_GT4
MKILLLINWKIKYCDHIPEDLQPSDYDCPQEVYWFFKYFKDKPEVDVVDISAPKFIEKIENKVRFHFFQTFKILFKLNKYDLIFVCGSNSAMLLCALKRVFHIKTPPILDVDISSFHQAYTSGLIHRLSQFSSRAFDYMVYHTSSQYDYYMEYFPWLKDKCKFVPFGVDYNYWKLKTYEDIPEKDQYIVCVGYRKRDWNTLLKAFDKIDIPEKLYLIGNPDIKCDNPKVKVLPFIPVAADGFGSSGISSRCFSYT

SEQ ID NO: 145 - DNA, 855 bp, Lactococcus lactis
  ORF coding a putative GT5 protein of DSM 33141
atgaagtgtgtaatgagcatactaaactataatgacagcaggcgagccttagaattagcagaacgatgtgtggaatttgattcaatagaaagaataattattgttgacaataaaagtacggatgattctgtaacatttctaacagagagagtaggatcaaatatagaattagtagttgcatctgaaaataggggttttgctgctggaaataatataggagcaaaatatgcacaagaaaaatataatcctgaatatatactatttgcaaatacagatacgattttctcagaaacggaagtaaatgcatgtttgagtaaattgaaagcaaaagcagatttgggattgatatcgatgaggataaaagatataaagggaaatgaagaaaaatcagcatggcattttaagtctttcttagactatacattatttaatatttggatatatagacatattacatacaaaaaaggcgtgtataaaagtttttccaatgattttcaatatgttgatattgttagaggaagttttatgttatttaaaatgaaagcacttatagaagctaacttttttgatgaaaatacgttcttatattatgaagaggaaattattgcatatcgtttacgtaaacatggatataaagttggattattgacaaattatttctatatacacaatcatattgcaagtggtacaggaaatatatggtttataaaaaaacacttagatgcttcattgagatgggttttgattaattactataatattggaaatgtaaaaataagaatatttgattttgcaactaaaatttgtagttgtgagacttttttaatagaaaaattgaaacggagaggaaaatga

SEQ ID NO: 146 - protein, 284 aa, Lactococcus lactis
  33141_GT5
MKCVMSILNYNDSRRALELAERCVEFDSIERIIIVDNKSTDDSVTFLTERVGSNIELVVASENRGFAAGNNIGAKYAQEKYNPEYILFANTDTIFSETEVNACLSKLKAKADLGLISMRIKDIKGNEEKSAWHFKSFLDYTLFNIWIYRHITYKKGVYKSFSNDFQYVDIVRGSFMLFKMKALIEANFFDENTFLYYEEEIIAYRLRKHGYKVGLLTNYFYIHNHIASGTGNIWFIKKHLDASLRWVLINYYNIGNVKIRIFDFATKICSCETFLIEKLKRRGK

SEQ ID NO: 147 - DNA, 1107 bp, Lactococcus lactis
  ORF coding a putative GT6 protein of DSM 33141
atgattttgatgaaagttggttttatatcaaactctgatgtttatgataaacgagcgtggagtgggacaataaattttctttatgaaacattaaataaagaatatgatatgtatccgattgtgatagaacataaaataattcaaaaaatgtcacgtataattacaaagggaaaacgtaagtataccttattagatagctttttttataaattagatattaacagaaaaataaaaaaagctcaaaaaaaaggcataaaagtgttttttgctccggcagcttcaacaatattaggggttgcaaagattcctatagattgcaaagtagtttatttgagcgatgcaacatatcattgtatgttaaattattattactttaatgaaagcaaaggagatataaaaaattataatagagtagagcagaagtcattgtgtagagcagacaaagtcatattttcaagtgaatgggctaaaaacgatgcaataatatattatggagtggattcaaataagatacatgtcttaccatttggagctaatttagaagataaatatagcggacatgatatgggagatatagtgaaaatcctatttgttggagtagagtgggaaagaaaaggggcagaattggctattgaatgcgtaaagaatttgaatagaagaaactataaaaagcggtttgaattgacgattatcggattagaaaaaccagaaaaatatctggctgatgacagtattcattttgtagggagattaaataaaaataatcgggatgaattaaattgcatgattaaatattatcaacagagtgatatttttcttttacctactaaagccgaatgttctgctattgtgtttagtgaggccgctatgtatggattgccagtgtttactcataatacgggaggtgttatgacttatgtagaagatggcaaaacaggcagaggattaaagttaggatcaaaagcagaagacttcgctgatgcaattctgaagatgttaaatgaagacaaatataaagaatggtcaataaacgcaagaaaaaaatatgagaaagaattgaattggaactgttgggttgagaagtgtaaagagttaattgaaaattaa

SEQ ID NO: 148 - protein, 368 aa, Lactococcus lactis
  33141_GT6
MILMKVGFISNSDVYDKRAWSGTINFLYETLNKEYDMYPIVIEHKIIQKMSRIITKGKRKYTLLDSFFYKLDINRKIKKAQKKGIKVFFAPAASTILGVAKIPIDCKVVYLSDATYHCMLNYYYFNESKGDIKNYNRVEQKSLCRADKVIFSSEWAKNDAIIYYGVDSNKIHVLPFGANLEDKYSGHDMGDIVKILFVGVEWERKGAELAIECVKNLNRRNYKKRFELTIIGLEKPEKYLADDSIHFVGRLNKNNRDELNCMIKYYQQSDIFLLPTKAECSAIVFSEAAMYGLPVFTHNTGGVMTYVEDGKTGRGLKLGSKAEDFADAILKMLNEDKYKEWSINARKKYEKELNWNCWVEKCKELIEN

SEQ ID NO: 149 - DNA, 600 bp, Lactococcus lactis
  ORF coding a putative acetyltransferase protein of DSM 33141
atggggggcaaaaaaggggatttagaacagaatcatgaggacactttgacatcatataaacaaatgaaagagatgttaaaaagagaaaaaaaatattatccaaatacatggtttgacaatataagttgtaatcaacgagtatacaactggcgattcatgaaattattacgcagatgcgagctttatagatataaggcggatcattctaagaatcctgtatggaaaggattatatttgattaatcgtacgaaaaagaaccggttaggtgtttggattggagtagagataccagagaatgtgttttcagaaggattaattattcatcatagtggaaatattgtagttaatggaagtagcaaagtagggaaaaattgtcaacttcatggagataattgtataggaaattcaggaaaagaaaatgaattaaaaaaatgcccacagattggagataatgtagaaataggagttggagcgaaagtattgggtggcattactattgcaaataatgtaaaaattggagccaatgctgtagttacaaaatcattttatgaagagggcattactcttgttggaatacctgcacataagctagaaaggtaa

SEQ ID NO: 150 - protein, 199 aa, Lactococcus lactis
  33141_acetyltransferase
MGGKKGDLEQNHEDTLTSYKQMKEMLKREKKYYPNTWFDNISCNQRVYNWRFMKLLRRCELYRYKADHSKNPVWKGLYLINRTKKNRLGVWIGVEIPENVFSEGLIIHHSGNIVVNGSSKVGKNCQLHGDNCIGNSGKENELKKCPQIGDNVEIGVGAKVLGGITIANNVKIGANAVVTKSFYEEGITLVGIPAHKLER

SEQ ID NO: 151 - DNA, 402 bp, Lactococcus lactis
  ORF coding a putative acyltransferase protein of DSM 33141
atgttaaaattacagctggagtcaggtttattacacttgactccagccgtttttggaatggctggttatccagtacatgacgactgtttatattatatggataaaattattattggagataatgtaatgattggtgcagacagtatagtaatgcctggtgttaaaataggaaataatgttattatagctgctggaagtgttgtaacaaaggaaattcctgatggagtagtagcgggggggggccctgctaaggtaataggaggatttgatgaattagctaaaaagcgatatgaacaatgtaatcatagaccatttctagccgctcaagagggtctccttttaaacttaatttttcaagatagtcgctatctccaaataaattcatcttcaatacctcgttag

SEQ ID NO: 152 - protein, 133 aa, Lactococcus lactis
  33141_acyltransferase
MLKLQLESGLLHLTPAVFGMAGYPVHDDCLYYMDKIIIGDNVMIGADSIVMPGVKIGNNVIIAAGSVVTKEIPDGVVAGGGPAKVIGGFDELAKKRYEQCNHRPFLAAQEGLLLNLIFQDSRYLQINSSSIPR

SEQ ID NO: 153 - DNA, 324 bp, Lactococcus lactis; identical to SEQ ID NO: 29
  ORF of the epsR gene of DSM 33137

SEQ ID NO: 154 - protein, 107 aa, Lactococcus lactis; identical to SEQ ID NO: 30
  33137_epsR

SEQ ID NO: 155 - DNA, 768 bp, Lactococcus lactis
  ORF of the epsX gene of DSM 33137
atgatgaaaaaaggaatttttgtaattactatagtgatatctatagcatttataattggaggtttttatagttataattctaggataagtaatctttcaaaagctgataaaggaaaagaagttgtaaaaaatagcagtgaaaaaaatcagatagaccttacctataaaaagtattataaaaatttaccaaaatcagttcaaaataaaatagatgatatttcatccaaaaataaagaagttactttaacttgtatttggcaatctgattcagttatttctgaacaatttcaacaaaacttacaaaaatattatggaaataagttttggaacatcaaaaatatcacttacaatggcgaaactagtgaacaattattggctgaaaaagttgaaaaccaagtattagccactaatcctgatgttgttttatatgaagctccactttttaatgataaccaaaacattgaagcaacagcctcactgactagtaatgagcaacttataacaaatttggctagtgcaggagcggaggtaatagttcaaccctctccaccgatctatggtggtgttgtgtaccccgtacaagaagaacaatttaaacaatctttatctacaaagtatccctatatagactactgggctagttacccagacaaaaattctgatgaaatgaagggactgttttctgatgatggagtatatagaacattaaatgcttcggggaataaggtttggctagattatattactaaatattttacagcaaactaa

SEQ ID NO: 156 - protein, 255 aa, Lactococcus lactis
  33137_epsX
MMKKGIFVITIVISIAFIIGGFYSYNSRISNLSKADKGKEVVKNSSEKNQIDLTYKKYYKNLPKSVQNKIDDISSKNKEVTLTCIWQSDSVISEQFQQNLQKYYGNKFWNIKNITYNGETSEQLLAEKVENQVLATNPDVVLYEAPLFNDNQNIEATASLTSNEQLITNLASAGAEVIVQPSPPIYGGVVYPVQEEQFKQSLSTKYPYIDYWASYPDKNSDEMKGLFSDDGVYRTLNASGNKVWLDYITKYFTAN

SEQ ID NO: 157 - DNA, 765 bp, Lactococcus lactis
  ORF of the epsB gene of DSM 33137
atgattgatattcattgccatattttaccggggatagatgatggagctaaaacttctggagatactctgacaatgctgaaatcagcaattgatgaagggataacaactatcactgcaactcctcatcataatcctcaatttaataatgaatcaccgcttattttgaaaaaagttaaggaagttcaaaatatcattgacgaacatcaattaccaattgaagttttacccggacaagaggtgagaatatatggtgatttattaaaagaattttctgaagggaagttactgacagcagcgggcacttcaagttatatattgattgaatttccatcaaatcatgtgccagcttatgctaaagaacttttttataatattcaattggagggacttcaacctattttggtccaccctgagcgtaatagtggaatcattgagaacccggatatattatttgattttattgaacaaggagtactaagtcagataacagcttcgagtgtcactggtcattttggtaaaaaaatacaaaagctgtcatttaaaatgatagaaaaccatctgacgcattttgttgcatcagatgcgcataatgtgacgtcacgtgcatttaagatgaaggaagcatttgaaatgattgaagatagttatggttctggtgtatcacgaatgtttcaaaataatgcagagtcagtgattttaaacgaaagtttttatcaagaaaaaccaacaaagatcaaaacaaagaaatttttaggattattttaa

SEQ ID NO: 158 - protein, 254 aa, Lactococcus lactis
  33137_epsB
MIDIHCHILPGIDDGAKTSGDTLTMLKSAIDEGITTITATPHHNPQFNNESPLILKKVKEVQNIIDEHQLPIEVLPGQEVRIYGDLLKEFSEGKLLTAAGTSSYILIEFPSNHVPAYAKELFYNIQLEGLQPILVHPERNSGIIENPDILFDFIEQGVLSQITASSVTGHFGKKIQKLSFKMIENHLTHFVASDAHNVTSRAFKMKEAFEMIEDSYGSGVSRMFQNNAESVILNESFYQEKPTKIKTKKFLGLF

SEQ ID NO: 159 - DNA, 696 bp, Lactococcus lactis
  ORF of the epsD gene of DSM 33137
atggctaaaaataaaagaagcatagacaacaatcgttatattattaccagtgtcaatcctcaatcacctatttccgaacaatatcgtacgattcgtacgaccattgattttaaaatggcggatcaagggattaaaagttttctagtaacatcttcagaagcagctgcaggtaaatcatacgagagtgctaatctagctgttgcttttgcacaacaaggtaaaaaagtacttttaattgatggcgatcttcgtaaaccgactgttaacattacttttaaagtacaaaatagagtaggattaaccaatattttaatgcatcaatcttcgattgaagatgccatacaagggacaagactttctgaaaatcttacaataattacctctggtccaattccacctaatccatcggaattattagcatctagtgcaatgaagaatttgattgactctgtgtccgattcctttgatgttgttttgattgatgctccacctctctatgcagttactgatgctcaaattttgagtgtttatgtaggaggagtggttcttgttgtacgtgcctatgaaacaaaaaaagagagtttagcaaaagcaaaaaaaatactggaacaagttaatgcaaatatattaggagttgttttgcatggggtagactcttctgagtcaccgtcgtattactactacggagtagagtaa

SEQ ID NO: 160 - protein, 231 aa, Lactococcus lactis
  33137_epsD
MAKNKRSIDNNRYIITSVNPQSPISEQYRTIRTTIDFKMADQGIKSFLVTSSEAAAGKSYESANLAVAFAQQGKKVLLIDGDLRKPTVNITFKVQNRVGLTNILMHQSSIEDAIQGTRLSENLTIITSGPIPPNPSELLASSAMKNLIDSVSDSFDVVLIDAPPLYAVTDAQILSVYVGGVVLVVRAYETKKESLAKAKKILEQVNANILGVVLHGVDSSESPSYYYYGVE

SEQ ID NO: 161 - DNA, 1155 bp, Lactococcus lactis
  ORF coding a putative GT1 protein of DSM 33137
atgaaggaaaaacatatttacattattggttcaaaaggaattccagcaaagtatggtggttttgagacttttgtagaagaactaacagcacatcaaagtaataaaaaccttaagtatcatgttgcttgtttatcaaatgacatacaatcaaattttattcataatggtgccgactgttttaatattccaaagaaaaatattggaccagcaaatgccatttattatgatttggcagctttaaagtactcacttaaagaaattgaagaaaaaaattataagggtgcaattatttatattttagcttgccgcattggtccgtttattggttactataaaaagcaaatgaaaaaattaggaattactttgatggtaaatcctgatggacatgagtggttgcgtgcaaaatggagtgtacctgtaaaaaaatattggaaaatttcggaacaatacatggttaaaaatgctgacttattgatctgtgatagtaagaatattgagacctatattcaagaatcttatgcgaaatataatacaaaaacaacttatattgcctatggcgcagatttagctccaagtcttttgaaggataatgacgaaaaattagtaaattggtatcaagaaaagggtttggaatctaatggatattatcttgttgtaggtcggtttgttcctgaaaataattatgaaataatgattagggaattcatgaagtctgatacaaaaaaagattttgttttaataacaaatgtagaacaaaataaattttatgatcaacttaaacagacaactggatttgataaagataaacgaataaaatttgtgggaactgtatacgataaagagttaatcaaaaaaatcagagaaaatgctttcggatatttccatggtcacgaagttggaggaacaaacccaagtttaattgaagcattggcgtcatctaaattaaatctcctgcttgatgtaggatttaataaagaagtaggtgaagatgctgcactctattggaataaagaaaagcaaaatcttgcacaattaattaaacatgtagaagaaaccgattattctcacatggaaagtaaagcaaaagaaagagttcaacattatttttcttggaattatattgttggagaatatgagaaagtatttacgaaataa

SEQ ID NO: 162 - protein, 384 aa, Lactococcus lactis
  33137_GT1
MKEKHIYIIGSKGIPAKYGGFETFVEELTAHQSNKNLKYHVACLSNDIQSNFIHNGADCFNIPKKNIGPANAIYYDLAALKYSLKEIEEKNYKGAIIYILACRIGPFIGYYKKQMKKLGITLMVNPDGHEWLRAKWSVPVKKYWKISEQYMVKNADLLICDSKNIETYIQESYAKYNTKTTYIAYGADLAPSLLKDNDEKLVNWYQEKGLESNGYYLVVGRFVPENNYEIMIREFMKSDTKKDFVLITNVEQNKFYDQLKQTTGFDKDKRIKFVGTVYDKELIKKIRENAFGYFHGHEVGGTNPSLIEALASSKLNLLLDVGFNKEVGEDAALYWNKEKQNLAQLIKHVEETDYSHMESKAKERVQHYFSWNYIVGEYEKVFTK

SEQ ID NO: 163 - DNA, 1212 bp, Lactococcus lactis
  ORF of a putative wzy gene of DSM 33137
gtgagtataacaaagataaaaaataatataggaatttttatttttacaattttagtcatttcaacatttgctactgggggaattctgtcagaattagatgaaattgctgcggtatgctcatttctaattttgattttttcttttttttgttcttgtttgaagaaaaagatatccaagatatttttaattattttattatttattatatttggattgatttcaaacataataagtgggatagataggagtgtttttgatgtacttatagatattgtgactgttgggaagccattttggatttttttagctatgattcaactcgtatctccagatacttttggctggttacggagaaaattttctcttataataaaaatatttattttgatgttatatatttttctctttctcaataccctgcatattgttcaaatggggaatacatttttattttctcaaattccgaattttagtttcacttttggctttccagtgccctttgctattgttttatactgttgtataggatttttacttaaaaatgatataaacatagtgagacaaccatggattatttctctaatattcttgataatcttcactggtaaaatgcaatcttatatttttgtagtcattttcttaggctttttgtctataagaacatacagagagaaaaacttaaaaataagtagattaattttgataggctttataggcgttttaatttcactaccaaaattagtgaactactttgcaacaacatcttattctccgagaaagttattgatgactgatggatttggtttcgctttaaaatatttcccatttggaacagggtttgcaacgtttggttctgctatggctagtaaagactattcatcattatattatcaattaggttatagtaatttttatgggatgcaacctggtggtggtttaggttcctttttgaatgacaattggggggcttcattaattggacaatttggctttttaggaacaattttatttagtattataattgttagaatatactttttaatgattgaatattgggggaacgaaaaaattggtttatatttaatatcaggttttactggattaatttctataattataggatcaagtttttttacaggtgcttcaggagcattattaatggcaacttttggaataatagtttcttatagaaaaaatgagatattgccataa

SEQ ID NO: 164 - protein, 403 aa, Lactococcus lactis
  33137_wzy
VSITKIKNNIGIFIFTILVISTFATGGILSELDEIAAVCSFLILIFSFFCSCLKKKISKIFLIILLFIIFGLISNIISGIDRSVFDVLIDIVTVGKPFWIFLAMIQLVSPDTFGWLRRKFSLIIKIFILMLYIFLFLNTLHIVQMGNTFLFSQIPNFSFTFGFPVPFAIVLYCCIGFLLKNDINIVRQPWIISLIFLIIFTGKMQSYIFVVIFLGFLSIRTYREKNLKISRLILIGFIGVLISLPKLVNYFATTSYSPRKLLMTDGFGFALKYFPFGTGFATFGSAMASKDYSSLYYQLGYSNFYGMQPGGGLGSFLNDNWGASLIGQFGFLGTILFSIIIVRIYFLMIEYWGNEKIGLYLISGFTGLISIIIGSSFFTGASGALLMATFGIIVSYRKNEILP

SEQ ID NO: 165 - DNA, 849 bp, Lactococcus lactis
  ORF coding a putative GT2 protein of DSM 33137
atgattttctactgtgtagttttatataataaaaaaattgacgaagcaattactataaaaaatctatttgagtgtaatttagataacagaaaaattgtagtatttgataatagcgataaattagattttagagaatataattcaaaatattataacgaaaaaatatattgtttactacaatcttccgataaaaatgttggcctatcagcagcgtataatagaatattagaaaaattatgcagagagtttgatatagaaaacgaaaagcaatatgtttgttggttagatgatgacacagacatatctcctgaatttttaattaaacaagaaaaagccataaatgagaattatgatattattgttcctaaaattataggacaagatggaattgtctattctccaaatgaagcaggaaaaataaaaaataatttagttttaaataattcaaataaaaaaatttcaaagttaaaattcaatgctattaatagttgtttaacagtaaaaacttcaatttactcgaattttaaattcgatgaacatttatttttagatcaggtcgatcagctattttttgacaatttgagaaagagaaggttttcttataagatagttgatgtaacaattgaacagagtttttctcaaagaggagcagcaattggagaaagctatataaatagatttcgaattagagtcaaagatataatgcaatatggaagattatctcctaataataatattttttattcatatctgaaaaatattttactaggatttaactttttcagaaaaacctggaaattgtcttatattaagataggtataatttcaatttggagctataagaaatga

SEQ ID NO: 166 - protein, 282 aa, Lactococcus lactis
  33137_GT2
MIFYCVVLYNKKIDEAITIKNLFECNLDNRKIVVFDNSDKLDFREYNSKYYNEKIYCLLQSSDKNVGLSAAYNRILEKLCREFDIENEKQYVCWLDDDTDISPEFLIKQEKAINENYDIIVPKIIGQDGIVYSPNEAGKIKNNLVLNNSNKKISKLKFNAINSCLTVKTSIYSNFKFDEHLFLDQVDQLFFDNLRKRRFSYKIVDVTIEQSFSQRGAAIGESYINRFRIRVKDIMQYGRLSPNNNIFYSYLKNILLGFNFFRKTWKLSYIKIGIISIWSYKK

SEQ ID NO: 167 - DNA, 1113 bp, Lactococcus lactis
  ORF coding a putative GT3 protein of DSM 33137
atgaaaatattattttgtcaaacccaatttaaaatggggggacaacaaaaagtactgctttctattgctaaagaattaaataagaagcatgaagttacagtctattatgaaaatcataatttttttgattttgaagatttaaatattataaaagcaaagaggagttttcaggttcttaatttctttttggcaatcttgatatgcagcttcaccttaaaatttgataaaaaaacaattatcgacacatggcatctatacaacgctagggattcattgcgtaaagaaaagtatgatattgtagtcttattaaatccttatgtcttgtttgtagatgaatttagaaaatttatagacactcaaaaaattatttgttggacacataatttatttgaagattatatgtttaatagatttaaaacagaacaaagtaaattgaagctaagtatgtctcatgcagataaaattatttcactagaaaagtataccgcatcaaaatggcgtgaaataaataaaaacactgtagttattcataatcccttgacaattaaaaatgaatctggatacaacaaaaaaaattcaaaaaaaataggaatggttactaggattgatattaatcaaaaaggtttggatattctagttaaaatagccaaattgttgaacccttctacacaggtttttattgctggttcaggtacaaagagtgaagaaataaaattttctaatttattaattgaaaataaattagaaaaacagataatcttactaggaagcttaaaaggcgaagagttagtggaattttatagtagtttggccttattgttggtaacaagcaggaatgaagggtttcctttagtagtagcagaagcaatgagttttggaactcacattataggttttgatattccttcaatgcgagaagttacagcgggaggacaatttgggacattaattccttttgacaatactgaactatttgctaaaaatattgaggatttacaaaataggttcttgtccaaagattttgatttaaagtctgaagaactagtaagatatgcagggaaattgagggtgaataaaataataaaagaatgggaagaagctcttactaaataa

SEQ ID NO: 168 - protein, 370 aa, Lactococcus lactis
  33137_GT3
MKILFCQTQFKMGGQQKVLLSIAKELNKKHEVTVYYENHNFFDFEDLNIIKAKRSFQVLNFFLAILICSFTLKFDKKTIIDTWHLYNARDSLRKEKYDIVVLLNPYVLFVDEFRKFIDTQKIICWTHNLFEDYMFNRFKTEQSKLKLSMSHADKIISLEKYTASKWREINKNTVVIHNPLTIKNESGYNKKNSKKIGMVTRIDINQKGLDILVKIAKLLNPSTQVFIAGSGTKSEEIKFSNLLIENKLEKQIILLGSLKGEELVEFYSSLALLLVTSRNEGFPLVVAEAMSFGTHIIGFDIPSMREVTAGGQFGTLIPFDNTELFAKNIEDLQNRFLSKDFDLKSEELVRYAGKLRVNKIIKEWEEALTK

SEQ ID NO: 169 - DNA, 1416 bp, Lactococcus lactis subsp. lactis
  ORF of a putative wzx gene of DSM 33137
atgaataaatacaaaaaactactatccaactcactcgttttcacaataggaaatttgggtagcaaactgttagtctttttactcgtaccactctacacttatgcgatgacaccgcaagagtatggtatggcagacttgtatcaaacaacagccaatctacttttgccactaattacaatgaatgtatttgatgcaactttacgttttgccatggaaaagtcaatgacaaaagagagagtgttaacaaattctcttgtagtatggtgttttagcgctgtgttctcttgtttgggcgcttttattatctatgcgttgaacttgagtaataaatggtatttatctttacttttaaccatcatcttattccaaggtgggcaaagcatactaagtcaatatgcgagaggcattggaaaatcgaaattatttgcagctggtggagttattttaacctttttgacaggcgctttaaatattctttttttggtatatttaccgcttgggattacgggctatttaatgtccctggttttagcgaatgtaggtacgattctattttttgctggcacactttccatttggaaggaaattagttttaaagtaattgataaaaaactgatttggcaaatgctctattatgccttacctttgattcctaatgccatcatgtggtggttactgaacgcatctaatcgctatttcgttttattctttttaggagcaggtgctaatggtcttttggcggtcgctaccaaaattccaagtattatttccatttttaatacgatttttacacaggcgtggcaaatttcagccatagaagaatatgattctcatcaaaaatcaaaatattattcggatgtttttcactacttagcaacttttctattgttagggacatcagcttttatgattgtgcttaaaccaattgtcgaaaaagtcgtttcaagtgactatgcaagttcatggcaatatgttcctttctttatgctggcgatgctattttcctcgttttctggattttttgggactaattatattgcggctaaacaaacaaaaggcgtatttatgacatctatctatggtgccattgtttgtgtcttattccaagtggttctgctacccaccatcggcttgaatggcgcaggtttatcagccttgcttggatttttaacaacgtttttattgcgtgtcaaagatacgcaaaaatttgtggcgattcagattaagtggcggatttttatcagtaatttattgatcgttttggcgcaaattttatgtttgttttatctaccgagtgaatttttgtattttgggcttgccctattattttgtggcatgttagtggttaatcagcgtacaattttatacattatcatggtgctaaaaaataagacatttggaatgaaatcctcataa

SEQ ID NO: 170 - protein, 471 aa, Lactococcus lactis
  33137_wzx
MNKYKKLLSNSLVFTIGNLGSKLLVFLLVPLYTYAMTPQEYGMADLYQTTANLLLPLITMNVFDATLRFAMEKSMTKERVLTNSLVVWCFSAVFSCLGAFIIYALNLSNKWYLSLLLTIILFQGGQSILSQYARGIGKSKLFAAGGVILTFLTGALNILFLVYLPLGITGYLMSLVLANVGTILFFAGTLSIWKEISFKVIDKKLIWQMLYYALPLIPNAIMWWLLNASNRYFVLFFLGAGANGLLAVATKIPSIISIFNTIFTQAWQISAIEEYDSHQKSKYYSDVFHYLATFLLLGTSAFMIVLKPIVEKVVSSDYASSWQYVPFFMLAMLFSSFSGFFGTNYIAAKQTKGVFMTSIYGAIVCVLFQVVLLPTIGLNGAGLSALLGFLTTFLLRVKDTQKFVAIQIKWRIFISNLLIVLAQILCLFYLPSEFLYFGLALLFCGMLVVNQRTILYIIMVLKNKTFGMKSS

SEQ ID NO: 171 - DNA, 915 bp, Lactococcus lactis
  ORF of the epsL gene of DSM 33137
ttggaggaaaaattggaacgaaaaaaaaagaaaaaaaagaatatttgggttataattatacctatcttaatttttattacccttataggagcaggggcttatgccttaagaaattcacttattcctactgatcatacgaaaacaaatagttcggatcaaccgaccaaaacttcggcctctaacggttatgtagaacaaaaaggtgaagaagctgctgtgggtagtatagcacttgtagatgatgctggtactccagaatggatcaaagttccctcaaaggtaaatctagataaatttactgatttatctacgaataatatcactatttatcgaattaacaatccggaagtcttaaaaacagttaccaatcgtacggatcaacggatgaaaatgtcagaagttatagctaagtatcctaattctttgattatgaatgcttccgcctttaatatgcagacaggtcaagtgaccggttttcaaattaataatggaaaattaattcaagactggagtccaggtacaacggttcaatatgcctttgttattaacaaagatggttcatgcaaaatttatgattcaagtacaccagctgtaaccattattcaaaatggggggcagcagtcttatgattttggtactgcgattatccgtgatggtaaaattcaaccaagtgatggctctgtagattggaagattcatatttttattgcgaatgataaagataataatctctatgctattttgagtgatacaaatgcaggttatgataatataatgaaatcagtatcaaatttgaaactccaaaatatgttattacttgatagtggtggctcaagtcaactatctgtcaatggtaaaacgattgttgctagtcaagatgatcgagccgtaccggattatattgtgatgaaataa

SEQ ID NO: 172 - protein, 304 aa, Lactococcus lactis
  33137_epsL
LEEKLERKKKKKKNIWVIIIPILIFITLIGAGAYALRNSLIPTDHTKTNSSDQPTKTSASNGYVEQKGEEAAVGSIALVDDAGTPEWIKVPSKVNLDKFTDLSTNNITIYRINNPEVLKTVTNRTDQRMKMSEVIAKYPNSLIMNASAFNMQTGQVTGFQINNGKLIQDWSPGTTVQYAFVINKDGSCKIYDSSTPAVTIIQNGGQQSYDFGTAIIRDGKIQPSDGSVDWKIHIFIANDKDNNLYAILSDTNAGYDNIMKSVSNLKLQNMLLLDSGGSSQLSVNGKTIVASQDDRAVPDYIVMK

SEQ ID NO: 173 - DNA, 903 bp, Lactococcus lactis
  ORF coding a putative LytR family transcriptional regulator protein of DSM 33137
atgaatcaaaaaaagaggcgtcattatcgtaagaaaaaacacacagtactaaaagttatttcaattatttttgtattagtaattatcgctgttgcttctatagcctacgccgcttatagaaatgttgaatcaacattttcaacatcatatgaaaatttccctaaaacaacaagtatcgacttaaaaaagtctaaaacattcaccacacttatcattgcaactggtaaaaataattctaaaaatacagcttatgctactgttttagcttcaacgaatgtaaagacaaatcaaactactttcatgaacttcccggtttttgcaacaatgcctaatcaaaaaacaatcactgaagtttacaatacgaatggagatgatggaattttccagatggttaaagacctattgaatttgtccattaacaaagtaattcagatcgatgttaataaaatgggatcacttgtacaggccactggtggaatcaccatgcaaaatccaaaggcattcaatgctgaaggttatgagtttaaacaaggaactgttaatttacaaactgctgatcaagtccaagcctatatgacacaaattgacgatactgatttggatgcttcaatcactcggattcaaaatgtctcaatggaactctacggaaatattcaaaaaattgctcatatgaaaaaacttgaaagtttcaattactatcgagaaattctctatgctttttcaaacactgttaaaaccaatataagtttcaatgatgctaaaacgatcgttatgagctacaataaggctctaaagaataccagcaagctcaatctacatacaacagatgaaaatggagctaaggtagtttctcaaacagaattagactcagtcaaaaccctttttgaaaaatctctaaaataa

SEQ ID NO: 174 - protein, 300 aa, Lactococcus lactis
  33137_lytR
MNQKKRRHYRKKKHTVLKVISIIFVLVIIAVASIAYAAYRNVESTFSTSYENFPKTTSIDLKKSKTFTTLIIATGKNNSKNTAYATVLASTNVKTNQTTFMNFPVFATMPNQKTITEVYNTNGDDGIFQMVKDLLNLSINKVIQIDVNKMGSLVQATGGITMQNPKAFNAEGYEFKQGTVNLQTADQVQAYMTQIDDTDLDASITRIQNVSMELYGNIQKIAHMKKLESFNYYREILYAFSNTVKTNISFNDAKTIVMSYNKALKNTSKLNLHTTDENGAKVVSQTELDSVKTLFEKSLK

SEQ ID NO: 175 - DNA, 951 bp, Lactococcus lactis
  ORF coding a putative Core-2/I-Branching protein of DSM 33137
atgaaggatagaaagaaacaagcaattttgatactagctcacagaaatactctcgctctaaaatcaacaatagagcttttggattcccaatactttgatttctttcttcatatagataaaaaaagtagaattcaagatttttttgatttaaaaaaaattacaaaatcctccactattcatttttcagaaagaaaaaatgtacattggggaggtttttctatggtagaagcaatgtttgcgctattagaatgtgcacgtgatacaggagaatactcttattttcattttttatcaggaaatgatatgccaatcaaagataatgaaatagtatttaatttttttgaaaatagctatcctcaaaattttattgatattctagattttgaaaatgtcaataaaacttcatatttctacgaaacctctgagatgatagaggagagagtgaagtactactatcctcatatggatattctaaacagaaaaggaaaaattttcatagggaaaaaactaatttatctacaaaaattgttgaaagttgatcgcttgaaaaatagagagatagaaattttcaagggtcatcaatggtgtagtttgacaaatcaatttgtagatattttattggataaagaggaaagaagagtaggtaagtcttatttttcatctagtttaataccagacgaatgttattttcaaacgtatgctatgataaaaaaagttgaaatttatcaacagaaaaatatgtcagcacgcttaattgattggacgagaggtaagccatatatttggcgacaggatgatttttttgaaattatgaatgataaagattcaatgttttctaggaagtttgatgaaaatgtagatcgtaaaataattgaagaaatttatataaaaataagaggaagaagtactgatgaagcaaataaaatcaaagataagagatttacaaaataa

SEQ ID NO: 176 - protein, 316 aa, Lactococcus lactis
  33137_Core-2/I-Branching protein
MKDRKKQAILILAHRNTLALKSTIELLDSQYFDFFLHIDKKSRIQDFFDLKKITKSSTIHFSERKNVHWGGFSMVEAMFALLECARDTGEYSYFHFLSGNDMPIKDNEIVFNFFENSYPQNFIDILDFENVNKTSYFYETSEMIEERVKYYYPHMDILNRKGKIFIGKKLIYLQKLLKVDRLKNREIEIFKGHQWCSLTNQFVDILLDKEERRVGKSYFSSSLIPDECYFQTYAMIKKVEIYQQKNMSARLIDWTRGKPYIWRQDDFFEIMNDKDSMFSRKFDENVDRKIIEEIYIKIRGRSTDEANKIKDKRFTK

SEQ ID NO: 177 - DNA, 780 bp, Lactococcus lactis
  ORF of the epsC gene of DSM 33137
atgcaggaaacacaggaacaaacgattgatttaagagggatttttaaaattattcgcaaaaggttaggtttaatattatttagtgctttaatagtcacaatattagggagcatctacacattttttatagcctccccagtttacacagcctcaactcaacttgtcgttaaactaccaaattcggataattcagcagcctacgctggacaagtgaccgggaatattcaaatggcgaacacaattaaccaagttattgttagtccagtcattttagataaagttcaaagtaatttaaatctatctgatgattctttccaaaaacaagttacagcagcaaatcaaacaaattcacaagttattacgcttactgttaaatattctaatccttacattgcacaaaagattgcagacgagactgctaaaatatttagttcagacgcagcgaaactattgaatgttactaacgttaatattctatccaaagcaaaagctcaaacaacacccattagtcctaaacctaaattgtatttagcaatatctgttatagccggattagttttaggtttagccattgctttattgaaggaattgtttgataacaaaattaataaagaagaagatattgaagctctgggactcacggttcttggtgtaacaacctatgctcaaatgagtgattttaataagaatacgaataaaaatggcacgcaatcgggaactaagtcaagtccgcctagcgaccatgaagtaaatagatcatcaaaaaggaataaaagatag

SEQ ID NO: 178 - protein, 259 aa, Lactococcus lactis
  33137_epsC
MQETQEQTIDLRGIFKIIRKRLGLILFSALIVTILGSIYTFFIASPVYTASTQLVVKLPNSDNSAAYAGQVTGNIQMANTINQVIVSPVILDKVQSNLNLSDDSFQKQVTAANQTNSQVITLTVKYSNPYIAQKIADETAKIFSSDAAKLLNVTNVNILSKAKAQTTPISPKPKLYLAISVIAGLVLGLAIALLKELFDNKINKEEDIEALGLTVLGVTTYAQMSDFNKNTNKNGTQSGTKSSPPSDHEVNRSSKRNKR

SEQ ID NO: 179 - DNA, 687 bp, Lactococcus lactis
  ORF of the epsE gene of DSM 33137
atggaagtttttgagggtgaatcatcacctgaatcggaagaacacaaattagtagtattaaaaaaattttcttatggagagctgattataaaaagagcaattgatatcctaggaggattagcgggttcagttttatttcttatcgcggctgcattgctttatgtcccttacaaaatgagctcggaaaaagatcaagggccaatgttctataaacaaaaacggtatggaaaaaacggtaaaattttttatattttgaaatttagaacaatgataattaatgctgatcagtatttagagctacatccagaagttaaagctgcctatcacgccaatggcaataaactagaaagtgatccccgtgtaacgaagattggttcatttattagacaacactcaattgatgaattaccacaatttatcaatgtccttaaaggggatatggcattagttggtccaagaccaattttactttttgaagcgaaagaatatggggagcgcctcccttatttactgatatgtaaacctgggattactggttattggacaacacatggtagaagcaaagttctttttcctcaacgagcagatttagaactctattatctccaatatcacagcaccaagaatgacatcaagcttcttatgcttacaattgcacaaagtattcacggatcggacgcttactaa

SEQ ID NO: 180 - protein, 228 aa, Lactococcus lactis
  33137_epsE
MEVFEGESSPESEEHKLVVLKKFSYGELIIKRAIDILGGLAGSVLFLIAAALLYVPYKMSSEKDQGPMFYKQKRYGKNGKIFYILKFRTMIINADQYLELHPEVKAAYHANGNKLESDPRVTKIGSFIRQHSIDELPQFINVLKGDMALVGPRPILLFEAKEYGERLPYLLICKPGITGYWTTHGRSKVLFPQRADLELYYLQYHSTKNDIKLLMLTIAQSIHGSDAY

SEQ ID NO: 181 - DNA, 1044 bp, Lactococcus lactis
  ORF coding a putative GT4 protein of DSM 33137
atgaagcaaataaaatcaaagataagagatttacaaaataattttacctatgtttttgggaagaaaacttttcttggaaggggagaagcgattatcatagatgaacctgagcatggaaatttgggagatcaagcaattgcttttgcagaaaatcaatttttagtaaatcatgtatcagtacgagatgtagaacatcttatagaaagcaaaactatttcagaaataaaatctatgaaaaaaaatattggaaaaaaagaattagttttttttcatgggggaggaaatttcgggacactttatctaaagtatgagcgcattagaagagtggcagtatcaaagcttccctttaataaaatgattctatttcctcagtcaatttcatttgaagatagtaggtttggtcagaagcagctgaataaaagtaaaaaaatatacagtcaaaatacaaattttattttgactgcaagagaaccaaaatcttatggtttaatgaagaaatgttttccagataacaaagtaatcttgacaccggatatcgtgctctcattaaatttaacagaacagtatagaggaaataataggaatggtatcataacaatgctcagggaagatatcgaacaaaagcttaataaaactcaatttgaaaaaattatcaaagagctgacagataaatttgaagtcaccatttctgatacgcatattgggaaagaaaaggatagtggtataacttatgaaaatcgtcaacactatcttgagataaagtgggatgaaattgcgcagcatgaggtcgtcttaactgatagattacatggtatgattttttcatatatcacaggcacaccatgtgttgttttggctaataataatcataaaattgaagaaacatacaaacattggttgaatgaagtgaactatattcgttttattgaaaatccgactgttgaaaatattttagatgcaatcagtgacttaaagcaaatcgaacctcactatattgatttatctgataaatttcaaccactaattgatgcgataaaagggtaa

SEQ ID NO: 182 - protein, 347 aa, Lactococcus lactis
  33137_GT4
MKQIKSKIRDLQNNFTYVFGKKTFLGRGEAIIIDEPEHGNLGDQAIAFAENQFLVNHVSVRDVEHLIESKTISEIKSMKKNIGKKELVFFHGGGNFGTLYLKYERIRRVAVSKLPFNKMILFPQSISFEDSRFGQKQLNKSKKIYSQNTNFILTAREPKSYGLMKKCFPDNKVILTPDIVLSLNLTEQYRGNNRNGIITMLREDIEQKLNKTQFEKIIKELTDKFEVTISDTHIGKEKDSGITYENRQHYLEIKWDEIAQHEVVLTDRLHGMIFSYITGTPCVVLANNNHKIEETYKHWLNEVNYIRFIENPTVENILDAISDLKQIEPHYIDLSDKFQPLIDAIKG

SEQ ID NO: 183 - DNA, 12651 bp, Lactococcus lactis
  Lactococcus lactis strain DSM 33192 and DSM 25485 eps gene cluster, complete sequence
atgaatgatttattttaccatcgtctaaaggaactagttgaatcaagtggtaaatctgcaaatcaaatagaaagggaattgggttaccctagaaattctttgaataattataagttgggaggagaaccctctgggacaagattaataggactatcagagtattttaatgtgtctccaaaatatctgatgggtataagtgatgagcctaatgacagttctgcaattaatctttttaaaactctaactcaagaagagaaaaaagaaatgtttataatttgtcaaaaatggctttttttagaatatcaaatagagttataacaataataaatttagggagtttttcttattaatatgatgaaaaaaggaatttttgtaattactatagtgatatctatagcattgataattggaggttttttatagttataattctaggataaataatctttcaaaagctgataaaggaaaagaagttgtaaaaaatagcagtgaaaaaaatcagatagaccttacctataaaaagtattataaaaatttaccaaaatcagttcaaaataaaatagatgatatttcatccaaaaataaagaagttactttaacttgtatttggcaatctgattcagttatttctgaacaatttcaacaaaacttacaaaaatattatggaaataagttttggaacatcaaaaatatcacctacaatggcgaaacaagtgaacaattattggctgaaaaagttcaaaatcaagtattggcgactaaccctgatgttgttttatatgaagctccactttttaatgataaccaatatagactactgggctagttacccagacaaaaattctgatgaaatgaaggggctgttttctgatgatggagtatatagaacattaaatgcttcggggaataaggtttggctagattatattactaaatattttacagcaaactaattaagttataaataacaattattaaatattggagaagaaatgcaggaaacacaggaacagacgattgatttaagagggatttttaaaattattcgcaaaaggttaggtttaatattatttagtgctttaatagtcacaatattagggagcatctacacattttttatagcctccccagtttacacagcctcaactcaacttgtcgttaaactaccaaattcggataattcagcagcctacgctggagaagtgaccgggaatattcaaatggcgaacacaattaaccaagttattgttagtccagtcattttagataaagttcaaagtaatttaaatctatctgatgactctttccaaaaacaagttacagcagcaaatcaaacaaattcacaagttattatgcttactgttaaatattctaatccttacattgcaaaaaagattgcagacgagactgctaaaatttttagttcagatgcagcaaaactattgaatgttactaacgttaatattctatccaaagcaaaagctcaaacaacaccaattagtcctaaacctaaattgtatttagcgatatctgttatagccggactagttttaggtttagccattgctttattgaaggaattgtttgataacaaaattaataaagaagaagatattgaagctctggggctcacggttcttggtgtaacaagctatgatcaaatgagtgattttaataagaatacaaataaaaatggcacgcaatcgggaactaagtcaagtccgcctagcgaccatgaagtaaatagatcatcaaaaaggaataaaagataggagttcaggatggctaaaaataaaagaagcatagacaataatcattatattattaccagtgtcaatcctcaatcacctatttccgaacaatatcgtacgattcgtacgaccattgattttaaaatggcggatcaaggaattaaaagttttctagtaacatcttcagaaacagatgaaggtaaaacaaccgtaagtgctaatatagctgttgcttttgcacaacaaggtaaaaaagtacttttaattgatggcgatcttcgtaaaccgactgttaacattacttttaaagtacaaaatagagtaggattaaccaatattttaatgcatcaatcttcgattgaagatgccatacaagggacaagactttctgaaaatcttacaataattacctctggtccaattccacctaatccatcggaattattagcatctagtgcaatgaagaatttgattgactctgtgtccgatttctttgatgttgttttgattgatattccacctctctctgcagttactgatgctcaaattttgagtagttatgtaggaggagtggttcttgttgtacgtgcctatgaaacaaaaaaagagagtttagcaaaaacaaaaaaaaagctggaacaagttaatgcaaatatattaggagttgttttgcatggggtagactcttctgactcaccgtcgtattactactacggagtagagtaattggaataaattttaatcaaataaaagacagaaatttgtagaagaggagagcaaatgattgatattcattgccatattttaccgggtatagatgatggagctaaaacttctggagatactttgacaatgctgaaatcagcaattgatgaagggataacaaccatcaccgctactcctcatcataatcctcaatttaataatgaatcaccacttattttaaaaaaagttaaggaagttcaaaatatcattgacgagcatcaattaccaattgaagttttgcctggacaagaggttagaatatatggtgatttattaaaagaattttctgaaggaaagttactgaaagcagcgggcacttcaagttatatattgattgaatttccatcaaatcatgtgccagcttatgctaaagaacttttttataatattaaattggagggccttcaacctattttggtccaccctgagcgtaatagtggaatcattgagaaccctgatatattatttgattttattgaacaaggagtactaagtcagataacagcttcaagtgtcactggtcattttggtaaaaaaatacaaaagctatcatttaaaatgatagaaaaccatcttacgcattttgttgcatcagatgcgcataatgtgacgtcacgtgcatttaagatgaaggaagcatttgaaattattgaagatagttatggttctggtgtatcacgaatgttacaaaataatgcagactcggtgattttgaacgaaagtttttatcaagaagaaccaataaaaattaaaacaaagaaatttttgggattattttaaaaggattaaatggagtaaataatggaagtttttgaggcatcatctgaactggaagagcctaagttagtagaattaaaaaaattttctcgcagagagataattataaaaagagggattgatattttagggggattagcgggttcaggtttatttcttatcgcggctgcattgctttatgtcccttacaaaatgagctcaaaaaaagatcaagggccaatgttctataaacaaaaacggtatggaaaaaatggtaaaattttttatattttgaaatttagaacaatgataattaatgctgagcagtatttagagctacatccagaagttaaagccgcctatcatgccaatggcaataaactagaaagtgatccccgtgtaacgaagattgggtcatttattagacaacactcaattgatgaattaccacaatttatcaatgtccttaaaggagatatgtcattagttggtccaagaccaattttgctttttgaagcgaaagaatatggggagcgcctctcttacttactgatatgcaaacctggaattactggttattggacaacacatggtcgaagtaaagttctttttcctcaacgagcagatttagagctctattatctccagtaccatagtacaaaaaatgatataaaacttattatgcttacaataaaacaaattctacatggatcggatgcttattaaagtaacattatgaaaaaaaaaacaactaaaatttgcatgatttcttcttctgggggtcatttaaaagagcttaatgaattgatagagatttcagagcagtatgaaacgtttcaaattactgaaaaagataaattttctaatatcaagattggaactaggcaatactatgtgaataaaattgatagagatgaaaaaaattttttatttcatttttttattctttttttgaaaatatttcaaatatttgctgtagagaagcctaaagttatagtaaccactggtgccttagtagcttatccagcatgtctaataggaaaattaatgagagctaaagttatttttatagagtcttatgctcgaacagaaacattatcattaacaggaaaattagtttataggttatctgatttatttattgttcaatggccagatctttcaaaaaaatattctaaagctaaatactatggggaattattctgatgatattaataatattagggactcaaaaatttcaattcaaccgacttataaaaaaagttgataaattaatagaagatgatcaaatcaaagattctgtaatagctcaaatcggatattctaattacaaacctataaattataaattttcagatttttttgatcaatcggaatttgattcattaataaataaatcagatataataataactcatggaggagtaggtgggatagtttcttccttaaaaaagaataaaaaaatcatagtagttccgcgtttaaagaaatacagagaacatattgatgatcatcaattagagatagcaagggcgtttcaaagaaaaaatctagttattttaaacgagaatctaaatgaactatgtaatgatatatctaaaattgaatcattcgagccaatacactatgtcaaagataataaaaaaattatatgtgaaataaaaaaatttatatcgaaagttaaatgatatttttatacaaaattatcttatgatgagaaaggactttttaaaagataaaaaatgataaaattgagcattataattccaatttataacgtggaaaaatatttaagtaaatgtttaaattctattttagaacaaacttataaagaaatagaaataatattagtaaatgatggtagtactgataactcaaaagatatagctgtaagctattgtgaaagatttcctaatgtttttaaatattttgagaaagataacggaggcctctcttcagccagaaattttggacttgaaaaaatttctggtgattttgtaggcttcttagactcagatgactatatagataacgatttatatgaaattatgattaattcattggatagttcaataaaaattgtggaatgtgattttatatgggaatacgaaaatggaaaaagtgtccttgataaaacatctgaatataattctatcaaagacttaatggttaacggtagagttgttgcttggaataaaatatataatgttgaatggttagaaaaaataaacataaagtttaaagaaggtctattgtatgaagatttaaattttttcttcaaaattgttcctcacttgactagtatttcagaagtatcaacagttaaaaatagttttgttcactatgtccagcataaaggtacaataacttcagataattctcttaatatcttggatatcataaaatcttacgaagatgtctttcattattataacgaaaaacagattaatgatttatattttgatgagctagaatataaattttctaggaacttaatgggggcatttttaaaaagagcaattaagattaaagataaaagacaacgtaaaataattttagatgaattttggaataatgttttatcttactatccgaattggaaaaaaaataaatatataaaaaaactatcaaaacagaatatacttttattttttattaataaatatacatataaattattttatttattataaaaaaaatttaatattagagtatttgtattagttgcaatgaaaatatcgaaagtagaataaatgatttatgtagaaataaggggaaacttaggtaatcaattatttatctatgccaccgcaaaaaaaattcaaaagttaaccggacaaaaaattcaattaaatacaacaactttaaataaatactttccaaattacaagtttggcctttcagaatttataatggaggatcctgattgttttattgaatcctataaaaaattaccctggttcacaaacgagtatctcttacctattaaaatttttaaaaaaatattgaataaaacacccaaaattaataaaatcctttcagatttttttttcaaagcttttgaaaaaaaaggatattttatttggcgaggagagacttttaaaaagttttctttaggaaatcataaaaattactatttatcaggtttttggcaatcggaagaatatttttatgatataagggatgaattattagaaatcatcactcctataaattcaataagagagtgtaactttgaacttctcaatttaataaggaattcagaatcaatttgtgtttcaatacgccgaggagattatgtagataatcctaaaatatcagctatttataacgtatgtgatataaattattttatagaatctgtaaatgaaataaagaaaaatgttgtgaatgttaaagttatctgtttttcagatgatgttgaatgggtcaaaaaaaatataaaattcgactgtgaaacacattatgaaacttatggtaattctttatctgaaaaagttcaacttatgtcttcttgtaaacattttgttttatctaatagttcttttagttggtggacagaatttttatctatacgaggtgggattactatagcccccaaaaattggtatgcagatgaacgtgaagctgatatctatagaaaaaattggatttacttagaagataagacagaggaagagtaatgggatttctatttttaactataatacttattttgtgggggtatagttttaccaatataaaaataagcccttttagtattttattcatgagtttagggatcttttactctcaatttacttcaataaatattgacttaataataaaagtactttttttgataacttccataatttatcttattaaagataaatattcaaaaaaatacgttttttctttattattaattgcagtattaattttaattgagtcaactagtccctctaaatttaatcaatattatggttttattgatgctttgacatcatttgcaaccttctcaacaggcatacttctattttccataaaatttagtttacaagaacgcagaagtattttaaaatcaatttcatatttgccaatcttttcagtgttaattggaatccctctaacttttggtggttttatatctatgacagctagaggaggaattgccctttcaggagcagctttagaaacaaatttatcttttttttcagttctaagccttgtttcattagatattttatatcaggacactcgttctaataaatatcaaattttaaaaattattaactttatattgctatgttgtactttaacacgaggcggtattatttctggaattatcattattttaccaagtttactatttcttttaaaaaaaggatttaaaggagtaagacaatttatttttttgattattactatttttgggagtatttatccgcttattttattgtggaaaagtattagtgagaggactttcagtgcagatggtattaatacttcaggtcgatatacggcctgggactatattgtgaatttgacaacaaacaaatctcagggaatgggattgggaagtttaaagacattaactgaggatattaatttacgtgcctttactgctgctcataatacatatattcaattttattatgaaactggttatttgggagtaacactattatctattttatttattttaatattaataataatcctaaaattgactaattatagaaaaaaaatcatttacttaacattcatttcatttttagtatatagttatacagataattgtattgttaataatagatactggtatttgtttatgtttattataggatgttttaaatattttgacagaaaggaagaaaatgcgctactttaaaatattatttgagattattcaactattggtagctagtattttatgtagattatataaaaatccaaatgatatctggctaataaatgaaaaacctgatgaagctagagataatggttatgctttttatcaatatttaagaaagaatttccccgatattaaagtttattatgtaatcagtaaagagtctactgatatttataagtttgataatgaaactaacattgtattttataagagttttttacattttattttatatatcaaatctaaagttttaattagttctcaaacattgccctatccatctagcagaaaattatgtgaagcgctaatgtaccttaatttgaataaaccaaagaggatttggttacaacatggagttactaaagataaactcccatatgagaatatggcaagggaaatttttaagtatgatttaataacctgtgtttcattaaaagaggctaattttataatgaaagaatatggatataatgaagatcaggtgaaggctcttggatttgcaagatatgataatttgccaattggaaataataacacatttgatatacttataatgcctactttccgtaagggttacgagattaaaaattttagtctcccaacagatagtgaaactaaacattttgaggaaagtgtattctttaaaacatatgttgatttattgaattctgaagagctagacgagtatttagaaaagtctggtaaaaaagcaattttttatttacactatgcttttcaaccatatgcaaaatctttttctaaacgactaatgtcttcaaatgttatcattgctgaaagaacagaatatgatgttcaaaaactattaattaattgtgaattgctaattacagattattcaagcgttttttttgatttttcatatatgaaaaaacctgaaatatttttccattttgatgagaaagaatatagaagtaatcattatagggagggatattttgattataaaacagatggatttggtccagtagttaattctaaagaagaattactaactgaaatcaaagagtttattgataacccatctctgttaatggaatttaataagcgagctaataatttcttcaaatatactgataacaataattgccaacgtattttaaaagaaatttggagaattaatgaaactaattaagaattatttaatgacaagctcttatcaattgttaattattatcttaccaataataacaacaccatatatatcgagagtacttagtccagaagggattggactttattcatatacttatactattacacagtatttcgtattatttgctactcttggtactgttacgtatggtagcagagagatagcatattatcagtcaaataaacaaaagagaagtgaaattttttggggaattaccttccttagctgggctactggtgctatatcacttttaatattttatatatttattttttttaatggcaaatatagtgttttatttttttggcaaagctttttgatttttggagttatttttgatattaattggtatttcacaggaatggaaaagttcaaggttattatttcacgtaacttttgtataaaaattattagtttattgtgtatttttgtctttgtaaaatctgagaaagatttaagtttatatatagttatactaggattgagcaatataataggtaatatattagtttggccatatttgagaaaagaggtttataaacctaatttttctaagttatcattcaaaaaacatttgggaagtacatggatattttttttgccacaaacttctgttactttaaactcattaataaaccaaaatatgattgcatattttgactcaataacaagcttaggatactttacacaaacaaataagtttactgtgattgcgatttcaatagttatttcaattgggactgttatgttgcctagaatgtccaatttagttgcgcgcaaagagtattcaaagtttacagactatgttactaagagtattaatataagctcaggaatttctatagcaataatgtttggtttaatggctatagcacctaagtttacaactttttttttaggagctcaatataaatttgttattcatttgctagttttatcatcaccgatagtggttttagtaacctggagtaatgttcttggtcaacaatatttaatacctttaaataggatgaaaatatttacaaaatctctaatttgtggaaacttagtaaatgtttctctaaacttgattttgttacccaaaatgggagtagaaatttcaataataaatcagttaattaatgaaattattattgtaggtattcaatttatatcagttagaaaagagttaaaaataaatataatattaggagatctaataaaatatttttttgcgggtataattatgtttattgccgttttatatctgaatttacaattaccgatgactatcttcacactacttatagagattggtattggagttcttatatattcaatgctagttatttctcttaaaactggattatataaagaattgaaaaagattattaaaattcgttagcttaaaatctatcacctttcatttgagtagtaagaaatacaaagctttattataaaatttatcatttttaagactatcataaaagaagaaggatgacatggaacgaaaaaagaagaaaaaaaaaatatatataattattctaatattattaatgtttatcactattgtttgttttgggggatatgctacacgagagttaattactcccactgaaaaaacaataccaaatgtctcggatcaacctaaaaaaacttcggcctctaacggttatgtagagcaaaaaggggaagaagctgctgtgggtagtatagcacttgtagacgatgctggtgtaccagaatgggttaaagttccctcaaaggtaaatctagataaatttactgatttatctacgaataatatcactatttatcgaattaataatccggaagtcttaaaaacagttaccaatcgtacagatcaacggatgaaaatgtcagaagttatagctaagtatcctaatgctttgattatgaatgcttccgcttttgatatgcagacaggacaagtagctggatttcaaattaataatggaaagttgattcaagactggagtccaggtacaacgactcaatatgcttttgttattaacaaagatggttcgtgcaaaatttatgattcaagtacacctgctttaactattattaaaaatggagggcaacaagcctatgattttggtactgcgattatccgtgatggtaaaattcaaccaagtgatggctcagtagattggaagattcatatttttattgcgaatgataaagataataatctctatgctattttgagtgatacaaatgcaggttatgataatataataaaatcagtatcaaatttgaagctccaaaatatgttattacttgatagtggtggctcaagtcaactatctgtcaatggtaaaacgattgttgctagtcaagatgatcgagccgtaccggattatattgtgatgaaataaaaataaaagaacctcatggttcttttattttagagatttttcaaaaagggttttgactgagtctaattctgtttgagaaacgaccttagctccattttcatctgttgtatgtagattgagcttgctggtattctttagagccttactgtagctcataacgatcgttttagcatcattgaaacttatattggttttaacagtgtttgaaaaagcatagagaatttctcgatagtaattgaaactttcaagttttttcatatgagcaattttttgaatatttccgtagagttccattgagacattttgaatccgagtgattgaagcatccaaatcagtatcgtcaatttgtgtcatataggcttggacttgatcagcagtttgtaaattaacagttccttgtttaaactcataaccttcagccttgaatgcctttggattttgcatggtgattccaccagtggcctgtacaagtgatcccattttattaacatcgatctgaattactttgttaatggacgcattcaataggtctttaaccatctggaaaattccatcatctccattcgtattgtaaacttcagtgattgttttttgattaggcattgtcgcaaaaactgggaagttcatgaaagtagtttgatttgtctttacattcgttgaagctaaaacagtagcataagctgaatttttagaattatttttaccagttgcaatgataagtgtggtgaatgttttagctttttttaagtcaatacttgttgttttagggaaattttcatatgatgttgaaaaggttgattcaacatttctataagctacgtaggctatagaagcaacagaaataattactaatacaaaaataattgaaataacttttagtactgtgtattttttcttacgataatgacgcctctttttttgattcat

SEQ ID NO: 184 - protein, 105 aa, Lactococcus lactis
  amino acid sequence encoded by the epsR gene of DSM 33192
MNDLFYHRLKELVESSGKSANQIERELGYPRNSLNNYKLGGEPSGTRLIGLSEYFNVSPKYLMGISDEPNDSSAINLFKTLTQEEKKEMFIICQKWLFLEYQIEL

SEQ ID NO: 185 - protein, 139 aa, Lactococcus lactis
  amino acid sequence encoded by the EpsX gene of DSM 33192
MEVFYSYNSRINNLSKADKGKEVVKNSSEKNQIDLTYKKYYKNLPKSVQNKIDDISSKNKEVTLTCIWQSDSVISEQFQQNLQKYYGNKFWNIKNITYNGETSEQLLAEKVQNQVLATNPDVVLYEAPLFNDNQYRLLG

SEQ ID NO: 186 - protein, 259 aa, Lactococcus lactis
  amino acid sequence encoded by the EpsC gene of DSM 33192
MQETQEQTIDLRGIFKIIRKRLGLILFSALIVTILGSIYTFFIASPVYTASTQLVVKLPNSDNSAAYAGEVTGNIQMANTINQVIVSPVILDKVQSNLNLSDDSFQKQVTAANQTNSQVIMLTVKYSNPYIAKKIADETAKIFSSDAAKLLNVTNVNILSKAKAQTTPISPKPKLYLAISVIAGLVLGLAIALLKELFDNKINKEEDIEALGLTVLGVTSYDQMSDFNKNTNKNGTQSGTKSSPPSDHEVNRSSKRNKR

SEQ ID NO: 187 - protein, 231 aa, Lactococcus lactis
  amino acid sequence encoded by the EpsD gene of DSM 33192
MAKNKRSIDNNHYIITSVNPQSPISEQYRTIRTTIDFKMADQGIKSFLVTSSETDEGKTTVSANIAVAFAQQGKKVLLIDGDLRKPTVNITFKVQNRVGLTNILMHQSSIEDAIQGTRLSENLTIITSGPIPPNPSELLASSAMKNLIDSVSDFFDVVLIDIPPLSAVTDAQILSSYVGGVVLVVRAYETKKESLAKTKKKLEQVNANILGVVLHGVDSSDSPSYYYYGVE

SEQ ID NO: 188 - protein, 254 aa, Lactococcus lactis
  amino acid sequence encoded by the EpsB gene of DSM 33192
MIDIHCHILPGIDDGAKTSGDTLTMLKSAIDEGITTITATPHHNPQFNNESPLILKKVKEVQNIIDEHQLPIEVLPGQEVRIYGDLLKEFSEGKLLKAAGTSSYILIEFPSNHVPAYAKELFYNIKLEGLQPILVHPERNSGIIENPDILFDFIEQGVLSQITASSVTGHFGKKIQKLSFKMIENHLTHFVASDAHNVTSRAFKMKEAFEIIEDSYGSGVSRMLQNNADSVILNESFYQEEPIKIKTKKFLGLF

SEQ ID NO: 189 - protein, 226 aa, Lactococcus lactis
  amino acid sequence encoded by the EpsE gene of DSM 33192
MEVFEASSELEEPKLVELKKFSRREIIIKRGIDILGGLAGSGLFLIAAALLYVPYKMSSKKDQGPMFYKQKRYGKNGKIFYILKFRTMIINAEQYLELHPEVKAAYHANGNKLESDPRVTKIGSFIRQHSIDELPQFINVLKGDMSLVGPRPILLFEAKEYGERLSYLLICKPGITGYWTTHGRSKVLFPQRADLELYYLQYHSTKNDIKLIMLTIKQILHGSDAY

SEQ ID NO: 190 - protein, 156 aa, Lactococcus lactis
  amino acid sequence of a putative glycosyltransferase GT1 of DSM 33192
MKKKTTKICMISSSGGHLKELNELIEISEQYETFQITEKDKFSNIKIGTRQYYVNKIDRDEKNFLFHFFILFLKIFQIFAVEKPKVIVTTGALVAYPACLIGKLMRAKVIFIESYARTETLSLTGKLVYRLSDLFIVQWPDLSKKYSKAKYYGELF

SEQ ID NO: 191 - protein, 160 aa, Lactococcus lactis
  amino acid sequence of a putative glycosyltransferase (GT2) of DSM 33192
MILIILGTQKFQFNRLIKKVDKLIEDDQIKDSVIAQIGYSNYKPINYKFSDFFDQSEFDSLINKSDIIITHGGVGGIVSSLKKNKKIIVVPRLKKYREHIDDHQLEIARAFQRKNLVILNENLNELCNDISKIESFEPIHYVKDNKKIICEIKKFISKVK

SEQ ID NO: 192 - protein, 316 aa, Lactococcus lactis
  amino acid sequence of a putative glycosyltransferase (GT3) of DSM 33192
MIKLSIIIPIYNVEKYLSKCLNSILEQTYKEIEIILVNDGSTDNSKDIAVSYCERFPNVFKYFEKDNGGLSSARNFGLEKISGDFVGFLDSDDYIDNDLYEIMINSLDSSIKIVECDFIWEYENGKSVLDKTSEYNSIKDLMVNGRVVAWNKIYNVEWLEKINIKFKEGLLYEDLNFFFKIVPHLTSISEVSTVKNSFVHYVQHKGTITSDNSLNILDIIKSYEDVFHYYNEKQINDLYFDELEYKFSRNLMGAFLKRAIKIKDKRQRKIILDEFWNNVLSYYPNWKKNKYIKKLSKQNILLFFINKYTYKLFYLL

SEQ ID NO: 193 - protein, 309 aa, Lactococcus lactis
  amino acid sequence of a putative glycosyltransferase (GT4) of DSM 33192
MIYVEIRGNLGNQLFIYATAKKIQKLTGQKIQLNTTTLNKYFPNYKFGLSEFIMEDPDCFIESYKKLPWFTNEYLLPIKIFKKILNKTPKINKILSDFFFKAFEKKGYFIWRGETFKKFSLGNHKNYYLSGFWQSEEYFYDIRDELLEIITPINSIRECNFELLNLIRNSESICVSIRRGDYVDNPKISAIYNVCDINYFIESVNEIKKNVVNVKVICFSDDVEWVKKNIKFDCETHYETYGNSLSEKVQLMSSCKHFVLSNSSFSWWTEFLSIRGGITIAPKNWYADEREADIYRKNWIYLEDKTEEE

SEQ ID NO: 194 - protein, 396 aa, Lactococcus lactis
  amino acid sequence encoded by the wzy gene of DSM 33192
MGFLFLTIILILWGYSFTNIKISPFSILFMSLGIFYSQFTSINIDLIIKVLFLITSIIYLIKDKYSKKYVFSLLLIAVLILIESTSPSKFNQYYGFIDALTSFATFSTGILLFSIKFSLQERRSILKSISYLPIFSVLIGIPLTFGGFISMTARGGIALSGAALETNLSFFSVLSLVSLDILYQDTRSNKYQILKIINFILLCCTLTRGGIISGIIIILPSLLFLLKKGFKGVRQFIFLIITIFGSIYPLILLWKSISERTFSADGINTSGRYTAWDYIVNLTTNKSQGMGLGSLKTLTEDINLRAFTAAHNTYIQFYYETGYLGVTLLSILFILILIIILKLTNYRKKIIYLTFISFLVYSYTDNCIVNNRYWYLFMFIIGCFKYFDRKEENALL

SEQ ID NO: 195 - protein, 396 aa, Lactococcus lactis
  amino acid sequence of a glycerophosphotransferase family protein of DSM 33192
MRYFKILFEIIQLLVASILCRLYKNPNDIWLINEKPDEARDNGYAFYQYLRKNFPDIKVYYVISKESTDIYKFDNETNIVFYKSFLHFILYIKSKVLISSQTLPYPSSRKLCEALMYLNLNKPKRIWLQHGVTKDKLPYENMAREIFKYDLITCVSLKEANFIMKEYGYNEDQVKALGFARYDNLPIGNNNTFDILIMPTFRKGYEIKNFSLPTDSETKHFEESVFFKTYVDLLNSEELDEYLEKSGKKAIFYLHYAFQPYAKSFSKRLMSSNVIIAERTEYDVQKLLINCELLITDYSSVFFDFSYMKKPEIFFHFDEKEYRSNHYREGYFDYKTDGFGPVVNSKEELLTEIKEFIDNPSLLMEFNKRANNFFKYTDNNNCQRILKEIWRINETN

SEQ ID NO: 196 - protein, 472 aa, Lactococcus lactis
  amino acid sequence encoded by the wzx gene of DSM 33192
MKLIKNYLMTSSYQLLIIILPIITTPYISRVLSPEGIGLYSYTYTITQYFVLFATLGTVTYGSREIAYYQSNKQKRSEIFWGITFLSWATGAISLLIFYIFIFFNGKYSVLFFWQSFLIFGVIFDINWYFTGMEKFKVIISRNFCIKIISLLCIFVFVKSEKDLSLYIVILGLSNIIGNILVWPYLRKEVYKPNFSKLSFKKHLGSTWIFFLPQTSVTLNSLINQNMIAYFDSITSLGYFTQTNKFTVIAISIVISIGTVMLPRMSNLVARKEYSKFTDYVTKSINISSGISIAIMFGLMAIAPKFTTFFLGAQYKFVIHLLVLSSPIVVLVTWSNVLGQQYLIPLNRMKIFTKSLICGNLVNVSLNLILLPKMGVEISIINQLINEIIIVGIQFISVRKELKINIILGDLIKYFFAGIIMFIAVLYLNLQLPMTIFTLLIEIGIGVLIYSMLVISLKTGLYKELKKIIKIR

SEQ ID NO: 197 - protein, 299 aa, Lactococcus lactis
  amino acid sequence encoded by the epsL gene of DSM 33192
MERKKKKKKIYIIILILLMFITIVCFGGYATRELITPTEKTIPNVSDQPKKTSASNGYVEQKGEEAAVGSIALVDDAGVPEWVKVPSKVNLDKFTDLSTNNITIYRINNPEVLKTVTNRTDQRMKMSEVIAKYPNALIMNASAFDMQTGQVAGFQINNGKLIQDWSPGTTTQYAFVINKDGSCKIYDSSTPALTIIKNGGQQAYDFGTAIIRDGKIQPSDGSVDWKIHIFIANDKDNNLYAILSDTNAGYDNIIKSVSNLKLQNMLLLDSGGSSQLSVNGKTIVASQDDRAVPDYIVMK

SEQ ID NO: 198 - protein, 300 aa, Lactococcus lactis
  amino acid sequence of LytR protein of DSM 33192
MNQKKRRHYRKKKYTVLKVISIIFVLVIISVASIAYVAYRNVESTFSTSYENFPKTTSIDLKKAKTFTTLIIATGKNNSKNSAYATVLASTNVKTNQTTFMNFPVFATMPNQKTITEVYNTNGDDGIFQMVKDLLNASINKVIQIDVNKMGSLVQATGGITMQNPKAFKAEGYEFKQGTVNLQTADQVQAYMTQIDDTDLDASITRIQNVSMELYGNIQKIAHMKKLESFNYYREILYAFSNTVKTNISFNDAKTIVMSYSKALKNTSKLNLHTTDENGAKVVSQTELDSVKTLFEKSLK

SEQ ID NO: 199 - DNA, 27444 bp, Lactococcus lactis
  DSM 33135 eps gene cluster, complete sequence
atgaatgatttattttaccatcggctaaaggaactagttgaatcaagtggtaaatctgcaaatcaaatagaaagggaattgggttaccctagaaattctttgaataattataagttgggaggagaaccctctgggacaagattaataggactatcagagtattttaatgtgtctccaaaatatctgatgggtataattgatgagcctaatgacagttctgcaattaatctttttaaaactctaactcaagaagagaaaaaagaaatgtttataatttgtcaaaaatggctttttttagaatatcaaatagagttataacaataataaatttagggagtttttcttattaatatgatgaaaaaaggaatttttgtaattactatagtgatatctatagcattgataattggaggtttttatagttataattctaggataaataatctttcaaaagctgacaaaggaaaagaagttgtaaaaaatagcagtgaaaaaaatcagatagaccttacctataaaaattattataaaaatttaccaaaatcagttcaaaataaaatagatgatatttcatcaaaaaataaagaagttactttaacttgtatttggcaatctgattcagttatttctgaacaatttcaacaaaacttacaaaaatattatggaaataagttttggaacatcaaaaatatcacttacaatggcgaaactagtgaacaattattggctgaaaaagttgaaaaccaagtattagccactaatcctgatgttgttttatatgaagctccactttttaatgataaccaaaacattgaagcaacagcctcacggactagtaatgagcaacttataaaaaatttggctagtacaggagcagaggtgatagttcaaccctctccaccgatttatggtggtgttgtataccccgtacaagaagaacaatttaaacaatctttatctacaaaatatccctatatagactactgggctagttacccagacaaaaattctgataaaatgaaggggctgttttctgatgatggagtatatagaacattaaatgattcggggaataaggtttggctagattatattactaaatattttacagcaaactaattaagttataaataacaattattaaatattggagaaaaaatgcaggaaacacaggaacagacgattgatttaagagagatttttaaaattattcgcaaaaggttaggtttaatattatttagtgctttaatagtcacaatattagggagcatctacacattttttatagcctccccagtttacacagcctcaactcaacttgtcgttaaactaccaaattcggatagttcagcagcctacgctggacaagtgagcgggaatattcaaatggcgaacacaattaaccaagttattgttagtccagtcattttagataaagttcaaagtaatttaaatctatcggatgactctttccaaaaacaagttacagcagcaaatcaaacagattcacaagtcattacgcttactgttaaatattctaatccttacatggctcaaaagattgcagacgagactgctaaaatatttagttcagatgcagcaaaactattgaatgttactaacgttaatattctatctaaagcaaaagctcaaacaacaccaattagtcctaaacctaaattgtatttagcaatatctgttatagccggactagttttaggtttagccattgctttattgaaggaattgtttgataacaaaattaataaagaagaagatattgaagctctggggctaacggttcttggtgtaacaacttatgctcaaatgagtgattttaataagaatacgaataaaaatggtacgcaatcgggaactaagtcaagtctgcctagcgaccatgaagtaaatagatcatcaaaaaggaataaaagataggagttcaggatggctaaaaataaaagaagcatagacaataatcgttatattattaccagtgtcaatcctcaatcacctatttctgaacaatatcgtacgattcgtacgaccattgattttaaaatggcggatcaaggaattaaaagttttctagtaacatcttcagaagcagctgcaggtaaatcaaccgcgagtgctaatctagctgttggttttgcacaacaaggtaaaaaagtacttttaattgatggcgatcttcgtaaaccgactgttaacattacttttaaagtacaaaatagagtaggattaaccaatattttaatgcatcaatcttcgattgaagatgccatacaagggacaagactttctgaaaatcttacaataattacctctggtccaattccacccaacccgtctgaattattagcatctagtgcaatgaaagacttgcttgactctgtgtccgatttctttgatgttgttttgattgatactccacctctctctgcagttactgatgctcaaattttgagtagttatgtaggaggagtggttcttgttgtacgtgcctatgaaacgaaaaaagagagtttagcaaaaacaaaaaaaatactggaacaagttaatgcaaatatattaggagttgttttgcatggggtagactcttctgagtcaccgtcgtattactactacggagtatagtagttggaataaactttaatcaaataaaagacagaaatttgtaggataggagagcaaatgattgatattcattgccatattttaccggggatagatgatggagctaaaacttctggagatactctgacaatgctgaaatcagcaattgatgaagggataacaaccatcactgccactcctcatcataatcctcaatttaataatgagtcaccccttattttaaaaaaagttaaggaagttcaaaatattattgacgaacatcaattaccaattgaagttttacccggacaagaggtgagaatatatggtgatttattaaaagaattttctgaaggaaagttacttacagcagcaggcacttcaagttatatattgattgagtttccatcaaatcatgtgccagcttatgctaaagaacttttttataatattcaattggagggtcttcaacctattttggtccaccctgagcgtaatagtggaatcattgagaacccggatatattatttgattttattgaacaaggagtactaagtcagataacagcttcgagtgtcactggtcattttggtaaaaaaatacaaaagctgtcatttaaaatgatagaaaaccatctgacgcattttgttgcatcagatgcgcataatgttacgtcacgtgcatttaagatgaaggaggcatttgaaatgattgaagaaagttgtggttctgatgtatcacaaatatttcaaaataacgcagggtcagtgattttaaacgaaagtttttatcaagaaaaaccaacaaagatcaaaacaaaaaaatttttaggattattttaaagggattaaatggagtaaataatggaagtttttgaggatgtctcatcacctgaaccggaagagcataagttagtagaattaaaaaaattttctcatagagagataattataaaaagagggattgatattttagggggattagcgggttcagttttatttcttattgcggctgcattgctttatgtcccttacaaaatgagctcggaaaaagatcaagggccaatgttctataaacaaaaacggtatggaaaaaacggtaaaattttttatattttgaaatttagaacaatgattcttaatgctgagcagtatttagagctacatccagaagttaaagccgcctatcatgccaatggcaataaactagaaaatgacccccgtgtgacgaagattggttcatttattagacaacactcaattgatgaattaccacaatttatcaatgtccttaaaggggatatggcattagttggcccaagaccaattttactttttgaagcgaaagaatatggggagcgcctctcttatttactcatgtgtaaacctgggattactggttattggacaacacatggtagaagcaaagttctttttcctcaacgagcagatttagaactctattatctccaatatcacagcaccaagaacgatatcaagcttcttatgcttacaattacacaaactattcacggatcggacgcttactaaaaaatgaaggaaaaacatatttacattattggttcaaaaggaattccagcaaagtatggtggttttgagacttttgtagaagaactaacagcacatcagagtaataaaaaccttaagtatcatgttgcttgtttatcaaatgacatacaatcaaattttattcataatggtgccgactgttttaatattccaaagaaaaatattggaccagcaaatgccatttattatgatttggcagctttaaagtactcacttaaagaaattgaagaaaaaaattatatgggtgcaattatttatattttagcttgccgcattggtccgtttattggtcactataaaaagcaaatgaaaaaattaggaattactttgatggtaaatcctgatggggagtgtgaaataatatggacaaccagaaaaagcctgaattcatacgggtttgcgcggcttgaccttttcacctcaacttgtttctgcctgtcatggtgcgttgcggccggtttcataggttctaaccttgtgaaacgaatttatcaggaggctccttctgctacggttatcggcatcgacaacatgaatgcctactatgatgtggcactgaaagagttccgcctgaatgagctggccaagtatcccacatttaccttttatggataatccgaacttccgcttcgtgaaggctgatatctgtgaccgcgaagctgtgaataaattgtttgaagaagaacatccggacatcgtggtgaactttgcggcagagtctcatgttgaccgttctattgaagatcctggcatcttcctccagaccaacatcattggtaccagtgttctaatggatgcttgccgtaagtatggcattcggcgttatcatcaggtttctaccggtgaggtttacggtgacctgccgctggatcgtcctgacctgttcttcactgaggagactccgatccataccagctctccgtatagcagttccaaggctgctgctgacctgctggttctggcttaccaccgcacctacgggctgcctgtgaccatttcccgttgctccaacaactatggaccgtatcacttcccggagaagctgattccgctgatgatcgccaatgcactggctgacaagccgctgcctgtttacggcgaaggtctgaatgtccgtgactggctgtatgttgaagatcactgcaaggccatcgatctgattatccacaagggtcgtgtgggcgaagtctacaatgtcggcggtcataatgaaaagcagaacatcgagatcgtaaagatcatctgcaaggagctgggtaagccggagagcctgattacccatgttggcgaccgtaagggtcatgatatgcgttatgccatcgatccgaccaaaatccacaatgagctgggctggctgccggagaccaagtttgaggacggcattaagaagaccatccaatggtatctcgataatcgtgagtggtgggagaccatcatcagcggtgagtatcagaactactacgagaaaatgtacagcaaccgctaagaagccagaggaggaaagaatatgaagttttttgtaactggcgttggcggtcagctgggtcatgatgtgatgaacgagctgctgaagcgcggccatgagggtgtaggctctgatattcaggaaaattacagtggtgtggcagacggctccgcagtaacaaaagcaccgtattttgccttggatattacgaacaaggatgcagttgagaaagtcattacggaagtaaatccggacgcagtgatccactgtgcagcatggacggctgtggatatggcagaggatgacgataaagtggcgaaagttcgtgccatcaatgcgggcggcacacggaatattgcggatgtctgcaagaagctgaattgcaagttgacctatatcagcacggactatgtgtttgatggtcagggcacagagccctggcagccggattgcaaggattataagcctttgaatgtatacggtcagacaaagctggaaggtgagttggcagtcagccagacgctggagaagtatttcattgtccgcattgcttgggtgtttggcttgaatggcaagaactttattaagaccatgctgaatgttggtaagacacacgacactgttcgtgtggtcaatgaccagatcggcacaccgaccaatacatatgatttggctcgactgctcgtcgatatgaatgaaaccgagaagtacggctattatcatgcaaccaacgagggcagctacatcagctggttcgatttcacgaaagaaatttatcgtcaggctggatataagacagaagtcctgccggtgaccacggcagagtacggtctgagcaaggccgctcgtccgttcaacagccgtctggataagagcaagctggtggaagctggctttactccgcttccgacttggcaggatgcactgagccgttatctgaaagaaatcgagcagtgatagaggagatagagaaaatgggacagattaaggttgataaaaatgtaggcggcatcgagggactttgtgtgattgagcctgctgtgcacggtgatgcccgtggctattttatggaaacctacaacgaaaaagatatgaagaaagctggtatcgacattcattttgtacaggataatcagtccatgtccatgaagggcgtgctgcgcggtttgcatttccagaagcagtatccgcagtgcaagctggtacgcgccgtgcgcggaactgtgtttgatgtcgctgttgatcttagaagtaattctgagacctatggcaagtggtatggtgtgaccctgtctgccgagaataagaagcagttcctcattccggagggatttgcacacggattccttgttctgagcgatgaagcagagttctgctataaggttaatgacttctggcatccgaatgatgagggtggtatggcttggaacgacccggagattggcattgagtggcctggagtacagggtgagtacaagggtagcgcgagtgcggaaggctatgagttagaggatggcactgcgttgaatctgagtgataaagaccagaaatggctggcactgaaggatacttttaaattttgagaacacaggggtagaagaatgcagcgggaaaacgaagtacaacacgtatttctggtaggtgctaaaagcctaggagcatatggtggttatgaaacctttgtatataagctgacagaacaccatcagaataagaaaaatattaaatatcatgtggcgtgtaaagctaatggtgacggctgcatggacgaaacaaaagtggatggcgtaaagggaatcaatcaacatgagtttgaattccacaatgcgcactgttttaaaattgatattcctcagattggtgcagcacaggcaatttactatgatgttgcggcattgaatgcttgctgtaagtacataaaggaacataaaatcaaacatccaatagtttacataatggcttgccgcattggaccgtttgcaggtcatttttatcaggaaatccataagcttggtggtacggtctatttgaatccggatggtcatgaatggatgagagccaagtggtcggctccgattcgtaaatactggaagatttctgagcggatgatggtcaaatactgtgaccttgcaatctgcgattctgtgaatatcgaaaagtatatccacgagtgttacgacgggaaaggaatcaaaggcagaaatcctaagaccacattcattgcttatggtgcagatttgacactcagcaagctggctgatgacgatgaaaagctggtgaactggtataaggaaaaaggactggcgaagaagggctattaccttgtcgttggacgttttgtaccggagaactcttttgaagtgatgattcgcgagttcatgaagagcggaagcaaaaaagattttgcgcttatcacaaatgtgaacgataaatttctgaatgaattggaagagaaacttcatttcaagagtgacaagagaatcaagttcgttggtacagtgtatgaccaagaactcttgaagaagattcgagagaatgcttacgcatatttccatggacacacagttggaggtacgaatccatcattgattgaggcacttggcagcacggatttgaacctgctggttgatgttggttttaataaagaggtcgccgaagattgcgctttgtattggagccgcgaaccgggcagtcttgcaagattgattgatcgtgcagataagatgagtaccgaagaaatcgcggaaatgggtcgaaaagccaagaagcgtgtagctgaagagtatacatgggataaaatctgtggacagtatgaagaagtgttcacaaagtgagagcaaatgagggatcagacagtgaaaatctcgaaatattatagaacattcttaagaagaaaactaaatgcggagaatcgcaaacgtctaaaaaacaaaaactttacggtgctatgtaataactgtgtggggggggtgatccttcacgagttaggtgaacgctttaattcgccaacggtcaatttgttttttaaagcggaagattatctcaaatttttggagaacttagattattacttaaaacaggctcttgtagaagttggaagcgagaagaactaccctgttgcaaaactggatgatataacaatatatttcatgcattattcatcgtttgatgaggcaaaaataacttggcaaaaacgagtggcaagaattaacaaaaacaatttgtatgtaatttttgttcaacaaagcggttgtacagagcaggtcttggaggcatttgacaagcttccctataaacataagctggcacttactgcaaagccaatgccggagataaaatgctcttattgtattcatggtacagcgcaaccgaatggagaagtaatggatttgtgcaagtatgagggaaagtttactggcaaacgctggattgatgaatatgattatgtgggatttttaaataagaaatgatgtgaggaattgatatgtatgattatttggtggtaggctctggtctttacggagcaatatttgcgcatgaagcaaaagcgcatggaaaatctgtgctagttgtggataagcgtccgaacattgggggcaatgtctacaccgagaacattgagggcatcaacgtccacaagtacggtgcacatattttccataccaacaacaaaaaggtttggaattacatcacgcagtttgccgagttcaaccgctttacaaattctccggttgctaattataagggtgaactgtattcgttgcctttcaatatgtataccttcaacaagatgtggggcgttgtgacaccggaggaagccgctgcaaaaattgaggagcagcgcaaggaaatcactggcgagccgaaaaatctggaggagcatgccatctctctcgtgggccgcgacatctatgagaagctcatcaaaggttacaccgagaagcagtgggggcgtgactgcaaggatctgcctgccttcatcattaagcgtcttccggttcgtctgacttttgataataactatttcaatgcgttgtaccagggtatccccattggcggttacaccaagatgattgccaacttgctggacggcatcgaggtgcgcctgaacatcgactatctggaaaacaaggttgagctggatgcgctggctggcaaggtggtttacaccggtcccatcgatgcctactttgactataagctgggtacgttggagtaccgttctgtccgctttgagaatgagttgctcgacaagccgagctcccagggcaacgctgcggtcaactatacagaccgcgagacgccgtggactcgtatcattgagcacaagtggtttgagtttggtagggacgagaacggcaatgatttgcccaaaaccattatcagccgagagtatagcagtgagtggaagccgggtgatgagccgtattatccggtcaatgatgctaagaacagcttactgtattctgagtataagaaactggcagatgctgaaagtaaagtgattttcggtggtcgtttgggtgagtacaagtattacgatatggatcagattattgccgctgtattggagagatgcgaaagggaatttgatgtatgaatggaaaaataatcgttgttacacataaagagtataaaatgccatgtgatacagtgtaccttccagtatgcgttggcgttggcagagatgctttaaggaataagtatcaggctgacgatgaaggtgaaaacatctctgataagaatattctttattgcgaactgacagcactgtattgggcttggaaaaacttgaactgtgattatatcggactggctcattatcgtagatatctaactgagtcaaagagaagtaaaaacatagaggatgctctatctcagcatagaattgaagaactcttgatggactatgacataattgtacctagagagaaaaggtattctcaaacaatagccgaccattatattaactgtattaaaagcagaaaagatgcacacaaaattcatttacaattacttcgtgattcgattcttgaggtagctccagagtatattgcagaatacgataagaccatgaatgggcatagtgcacatatgcttaatatgtttgtgatgaaaaagcaaaatctggacaattactgcgagtggctatttaagattttatttgttttagaaaaaaaaatatatgaccatgatgtctactatgatcgtataatgggcgcatttagtgagttcctattggatgtatggattagaacaaataaaaagacgtatatagaggttgagttaatcgaaactgaaagagactattggggtaagattaaatgggctctgaaaagaaagctgtttgaataaggagataatataatgcgaatcctgcattactcactagggtttcccccttatcgaaggggaggcctgacaaaatattgtttggatcttatggtagcacaggaaatgcagggtaatgtggtagctatgtgctggcctggtgaaatcggaattatcaagaagaaaaaagttgcaataaaaaaaagaaaaaaatacagcataggaaagagtaagattgaaaattatgaaatacaagggattttacctgttcctcttttagagggaataaaaaatccggatctatttactgaaaaaaagaaccaagaaatttggaaactatttttaaagaactggagacctgatgttatccactttcatacattaatgggcttgccgctagaatatgttgaaacggcaagaaagcttggaataaaaacattatttacgacgcatgattattttggattgtgtccaaggacgactttggtgcgtcaaaatggcgaaatttgtgatggctgcacaccggaattgtgcgcggaatgctgtgagaatgctatcagttatagaaaattgaaaattctacaatcttcagtgtatagggttctgaaagatttagtaattgtaaaaaagctcagaaaaaaacattggaatgaatcgaaaaatgattctgcacaacatcaggcttctgttcagaacgcacaacgagcagaagaatatgttgagctacgaaaatattatataaaactactaaaaagttttaatatcatccattttaatagtagcaatacaagagatgtgtatttaaaagcggccaaggaggtgttaaacaacgaggtcgtttctatatcacatgaaatgataaaagataacaaaaagaaaaaaaggaaacacgagatattgcacctttcttatttgggaccggatacatataataaaggatactatgtattaaaagaaacactgaatcagttgcataaagaaggatataagtttcagttaaatatttattttgaggatgcttcggagccctttatcgtttcacatgcgccgtatcaatactcagaattaggcaaggtgatggatgatgcagattgcgttatattacctagtttggggaatgaaacatttggctttacagtcttagaagctctaagttatggagttcctgttattgttagtagtcgtgttggtgcaaaggatattgttgaagagggtaaaaacggatttgttgttgaaggtgatgtagactctttaaaaacaaagctgacaagtgtgttgaatcaacctgaaatattggaagatatgaataactatattgttgcaaatacacacattaaaacaatgacagaacattctaaagaaatcaaggacctgtatcaaaagtgacttgtatataaaaatggagaagattatggatttagataaaattagatggaattcagaggtcagtcatccaaattttatagctcaatatagatttgtaaaagcaaaaagattatgtgagtattgggctgacaaaaataagctgctgtacttatttgctcggatgcgatatgaacattataaagtaaaatataatacagatattcctgcccgttgtaaaatcggggggggtcaaaatcaggcatctcggaggtattgtatttaacccgggtgttgaaattgggaaaaatgttgattgcttaaatggcgttttgcttgggcaaatcgatttcggtgccaaagcaggtgtgccaagaattggtgataatgtgtttttaggaaccaattctattgttgtcggtaagattcaaataggaaatgatgtgttaattgctcctggtgcatatgtgaactttgatgttccggatcactctatagtaataggaaatcctggaaagattattgcaaaacaaaatgcgacaagaggatatatagcatcacctgttgaagattaaatgagcggataataaatagcgaggagttatgagtccgcacgttttctgcaaagggagaacaaattgtgcaagataaagtaagtattattgttcctgtatataaagttgagagggaactagatcgctgtgttcaaagtctgattaaacagacttataaaaatttggaaataattcttgtggatgatggtagtcctgatcaatgtcctgaattatgcgaaaattatgctgagatagataagagagttaaggtcattcataaagagaacggcggattatcagatgctcgtaatgcgggattgaaacaagcaacaggcaagtatattctgtatgttgattctgatgattatattgatttggatgcctgcgaaagatttataaaggcggcgggtaatcaaaaaatagatattgttgttggaaatgcaattatggaaaaaccagatggtaaagaaatgatgatacactcagcgacaccatctggaatcacctatactgccaaacagtttattatgagtgctgttaaagcatatcagtggtatgcccctgcatggcttaatatgtatagaagggactttcttcttgataatcagttatacttcaaaaaaggaatttactttgaggatgttcaaatgctgccacgtgtttttttggccgcaaaaaaaatcacatgcatatatggaacattttatcattatattattcgagaaaattcaattatgacgtctcagaaagacgagaaaaagaaaaacgattcaattcaaaatatgaaagagtggaaagagcagtttgatcttgtagatgatgtggccttgaaaaaatgcctatatggaatgcttgtgaaaatgtatatacacgaatgtaggcagtatgggattacgactaaagcaattgaaggaatggatgatagatttatattggggaactgtctcaattataaagaaagattaaaggctactatgtggttgtgctttccaaggctactgataaaacagtgaaggagtgcatatgagtgtttacatatttttatgggttgctgtagttgtatttggctttatcgcaagtagaagtaattataaagcaaaatattttgtgctcttttcttttttcctgatgacaattgttttaggactaagaggggctacagttggcgaagatacaaaaatgtatcttaatattgcagaaagagtaactaatatatcatggaaagaagtgttttctagctttccaacgagtcagtggagatatatttcatatggtggcttaagtggatttagtgagcagacggaaacagtttatttggcctattgcaaattgataatgcttatatttcataatgcacaggcagttcttcttataacagctgcaattacgaatgctctatttgcaaagtttattttagataacataacagtcaaacaagatgccatactggctgtttatatttacatgtgcgatgcgatgtttatgaattcgtttaatacaatgcgacaaattttggcaatatccattgcagtgcaatccatagaattaataaaaaaagaaaagtataagaaagcaatagcatgtgttctattagccgcatgcttccatcaatctgcaatagttttttttgttgccgatttattctatttattaaagaagaaaaaagaaagatatatttatctccttgtgactctttgtgcattgccagttttaatccctgtggctattaaagtggtcagtatcttctccagtaaatatgcaagttatttgtcagttagtttttggggagcacaactacgaggaacactcttgctctggataattattgcaattgttctgtttattatgatacgtgctaaccaatcggataatatagattggtggctaatctatatggcaacaatttacattggtgtagagcttgttggaatgcagttgacggttatatctagggtggcaatgtactttagaattttccttgtattgctctttccgattgctcaaaaatatttcactaaaaaaagtggacagttttataaaattggcgtggttatgctaatgactgtatcgttctttagttatgcgagttcgcctgatcgtttgtacactttttgcttttaatgatcaaagagggagggcagaggaatgcctattgcttcggtgataatacctacatataaaggaagtagtgccttaaatagggcaattgatagtgtgttgtgtcaatcatataaggaaattgaaaaaattgtagttgatgataatggttctgttgcaaagttttaaatctactatcaaataaggtagaataatagaaaaagatagcaggaggaatgacgatgaatcattttaaaggagagcaatttcagcaggatgtgattattgtagccgtgggctactatcttcgttataaccttagctatcgtgaagttcaagaaatcttatatgatcgtggcattaacgtttctcatacgacgatttatcgttgggtgcaagaatatggcaaactactctatcaaatttggaaaaagaaaaataaaaaatccttttattcatggaaaatggatgaaaacgtacatcaaaattaaaggaaaatggcattatttgtatcgagccatcgatgcagatggtttaaccttggatatttggttacgtaaaaaacgggacacacaagcagcctatgcttttcttaagcggttagtgaagcagtttgatgaaccgaaggttgtagtcacagataaagccccctctattaaaagtgcctttaagaaactaaaagaatacggcttttatcaagggacagaacatcgtaccattaaatacctgaataatttgattgaacaagaccatcgtccagtaaagagacgcaataaattctatcgaagtttacgcactgcctcacccacgattaaaggcatggaagccattcgaggattatataagaaaacccgaaaagaaggcactctcttcgggttttcggtctgtactgaaatcaaggtattattgggaatcccagcttaaatcatagataccgtaagggattttattctttatttaaaactttgcaacagaaccaagatttgtataaaaaataaaaatatggaggtacaatcatgggaaaaattcctatgagtaaggtagacaaggagtctgttttaaacatgcttatcagcaatgaaaacagcgtgaagattccgcaagcggtggaagtggttgattatcaaacaggcgagttcgacagaggaggcgaaaaaggtctgatgtattgggctaatttatgcgttgttgatgttgaagagttagaacttctgaaaagtgttggtttggaagaaaatgctattctgattaagctgaaagtatctgattataataatgaaaatcttgaggttttaaaaggtaaagtgctagatactaaatctatggaaatagtgtttgtagagaaaaaaagtaaagtaggtaacgaaattacaggcttggcatttaaaacaagttttagagatttaagaggagtctgttttaaacatgcttatcagcaatcaaaacagcgtgaagattccgcaagcggtggaagtggttgattatcaaacaggcgagttcgacagaggaggcgaaaaaggtctgatgtattgggctaatttatgcgttgttgatgttgaagagttagaacttctgaaaagtctatattttggggggcactacagaaatggaacgctcttcggcttttcggtgtctactgaaatcaaggtattaatgggaataacagcctaagatatttggagttcacagagggcgcatttgattttcaaacttcgcaatagaaccaaatagggttaatctcatcaagaaaaggagttagaaacagttgcgaaaatatatgatctacctcagcagtttattggtcacatttatcctgagttatgcgacgattaattggctgattatgcccgttctcactcgctatcaaagcctggctaggttgattaaccactttgactataccgcattaactttaatactcttattaacgctgattatctggttgtttggcatccagtatcacctcaaacatttttcagttatttatctctatcttgctttcagtgtgtatttattactgttattcatggtgctttttactaaaacaacggattttcaggcgatatcactgaatccttttgactttataaaagcggataccagaacgattcaagaggcagtgctaaatattatctacttcattcctttaggtggcctttactgtatcaatactgatttcaaacagtttgtcattgtcagtttggtcacacttttaggaattgaaaccattcaatttatcttttatttgggcacatttgccattagtgatattatcttgaattttttgggttgtttgattgggtattattgttgttgggagattaaaaggcggttgagttgagctaacccaaaagtagcataaaaaggttctgttgcaaagttttaaatctactatcaaataaggtagaataatagaaaaagatagcaggaggaatgacgatgaatcattttaaaggaaagcaatttcagcaggatgtgattattgtagccgtgggctactatcttcgttataaccttagctatcgtgaagttcaagaaatcttatatgatcgtggcattaacgtttctcatacgacgatttatcgttgggtgcaagaatatggcaaactactctatcaaatttggaaaaagaaaaataaaaaatccttttattcatggaaaatggatgaaacgtacatcaaaattaaaggaaaatggcattatttgtatcgagccatcgatgcagatggtttaaccttggatatttggttacgtaaaaaacgggacacacaagcagcctatgcttttcttaagcggttagtgaagcagtttgatgaaccgaaggttgtagtcacagataaagccccctctattaaaagttcctttaagaaactaaaagaatacggcttttatcaagggacagaacatcgtaccattaaatacctgaataatttgattgaacaagaccatcgtccagtaaagagacgcaataaattctatcgaagtttacgcactgcctcacccacgattaaaggcatggaagccattcgaggattatataagaaaacccgaaaagaaggcactctcttcgggttttcggtctgtactgaaatcaaggtattattgggaatcccagcttaaatcatagataccgtaagggattttattctttatttaaaactttgcaacagaaccgagataataatcacgtctttttggaattgtttgcccttaaaatgattcatctgttgtcctcgcattcttttttattacattttacaataaatcgggtgttatggggaactttgcaacagaacctatttgaatttagtccagttctaactatcttttttttcaaatttaagctaaaatagatttttggaaaactttgcaacagaacccttagttttctgtgtttttttctaatttcatttagaggtgaattaattggtagttattagaggtgccctataaaataacttagagctttgtgggagctacccactaatactaatataaggagatagacaatggatttaaaagatttaataagtgttattgttccgatatacggcgttgaagaatatttaaataaatgtatcgactctattatcaatcaaacatataaaaatctagaaattattttggttgatgatggtagtccagataaatgtccagatatatgcgatacattcgaaaaaaaagatgagagaataaaggtaatccataaaaagaatggtggattatctgatgcgagaaatgccggtattgatacagcacatggagactatttcgtttttgttgatagcgatgattggattgaaaacacaatggtagagcatttgctcttcgcatgtaaaaaatataatgttgaaatggcaacttgtgctagatatattacagatggtcattcaactagagcagtcgcatttaatggtccagcaggagcatattcagctgaagaagcattgaatgaaatactcttaggaaagtcgatggatgttgctgcttgggataaaatttatgctcgtaatctatttgaagaaatacggtttccggttggtgaaaataatgaagacattgcagttttctataaactagtagacttggctggcagagtagcacataccggtacaacggaatatttttatcggagtcgtccgggcagtattacaaaattgaaatatagtacagatgccagaaaaatcatcgagaaaaatctgaattcaatagaaaaatttcttgataaaaagtatccaagctgtttgccaagtttttatcgttataaaacaatgaacatttatgcattgttgaataagtatattaaatgcgaaggaacaaagaaaacacaagaatttgagcatctgatgaacgagttccgaaaaaataagagctatttctttaatgatgatcagaccccatcaaaagaaaagaagattgccataatgattcttttgcatctttacaatccgtatttacttgtaaaagaaaagattacgggttataagtgacgaagggagaaattgagaaaatgattggttctgttgcaaagttttaaataaagaataaaatcccttacggtatctatgatttaagctgggattcccaataataccttgatttcagtacagaccgaaaacccgaagagagtgccttcttttcgggttttcttatataatcctcgaatggcttccatgcctttaatcgtgggtgaggcagtgcgtaaacttcgatagaatttattgcgtctctttactggacgatggtcttgttcaatcaaattattcaggtatttaatggtacgatgttctgtcccttgataaaagccgtattcttttagtttcttaaaggcacttttaatagagggggctttatctgtgactacaaccttcggttcatcaaactgcttcactaaccgcttaagaaaagcataggctgcttgtgtgtcccgttttttacgtaaccaaatatccaaggttaaaccatctgcatcgatggctcgatacaaataatgccattttcctttaattttgatgtacgtttcatccattttccatgaataaaaggattttttatttttctttttccaaatttgatagagtagtttgccatattcttgcacccaacgataaatcatcgtatgagaaacgttaatgccacgatcatataagatttcttgaacttcacgatagctaaggttataacgaagatagtagcccacggctacaataatcacatcctgctgaaattgctttcctttaaaatgattcatcgtcattcctcctgctatctttttctattattctaccttatttgatagtagatttaaaactttgcaacagaaccaaatatggtataatttaaggtatataatatatatatggagataccatgaatcaaaaaaagaggcgtcattatcgtaagaaaaaacacacagtactaaaagttatttcaattatttttgtattagtaattatcgctgttgtttctatagcctacgccgcttatagaaatgttgaatcaacattttccacatcatatgaaaatttccctaaaacaacaagtattgacttaaaaaagtctaaaacattcaccacacttatcattgcaactggtaaaaataattctaaaaatacagcttatgctactgttttagcttcaacgaatgtaaagacaaatcaaactactttcatgaacttcccagtttttgcgacaatgcctaatcaaaaaacaatcactgaagtttacaatacgaatggagatgatggaattttccagatggttaaagacctattgaatgtgtccattaacaaagtagttcagatcgatgttaataaaatgggatcacttgtacaggccactggtggaatcaccatgcaaaatccaaaggcgttcaatgctgaaggttatgagtttaaacaaggaactgttaatttacaaactgctgatcaagtccaagcctatatgacacaaattgacgatactgatttggatgcttcaatcacccggattcaaaatgtctcaatggaactctacggaaatattcaaaaaattgctcatatgaaaaaacttgaaagtttcaattactatcgagaaattctctatgctttttcaaacactgttaaaaccaatataagtttcaatgatgctaaaacgatcgttatgagctacaataaggctctaaagaataccagcaagctcaatctacatacaacagatgaaaatggagctaaggtcgtttctcaaacagaattagactcagtcaaaaccctttttgaaaaatctctaaaataaaagaaccatgaggtgtagtgacccccaaaatatagacttttcaaatctatatttcggaggtcttttcttatggtcaaatattccatagaattaaaacaacgtgttattcaagattatttatctggcaaaggaggctctacctatcttgctaaaatgcacaacgtaggttcatctagtcaagttagacgctggattcgcaattatcgagcagagggacttcctacagctcactccaaagtcaataaaaattattctatggaattgaaagaaaatgcggtacaatgttatttaacaactgatttaacttatgaagctgtggcaagaaaattcgaaattactaattttaccttacttgcaagctgggttaatcatttcaaactctatggagaagtcccaataagcaaaaagagaggacgacgtaaaaaactagaaagcattgcatcgtctatgactcagaactcaaatgattctcaacgaattaaagaacttgaacaagaattacgttatgcgcaaattgaggtagcttatttaaaatgacttcggacattggagaaaaatgctctaatgaacaaaaatcaagactcatctacagtctccgtaaaaccttcaaactcaaagaaatcttgaaagttacaggattccctaaagccacttattattattgggtcaactgttttgaacgggtaaacaaagatgagcttatcgaaaaagaaatgcttaaaatacgtcaagaacatgccaatgcaggttaccgtccattgagtgaattacttaagcaacgtggctatcacgtcaaccacaagaaggtccagcgcttaatgaagaagctagggcttcgtgtaacgtcttattggcacaaatcacgtaaatataattcttataaaggaaaagtagggacggtagctaaaaacaaattgcacagacgattcagaacttccattcctcatcaaaaaatcacaacagatacgactgaattcaaatattatgaagaagggattcagaaaaaatgttatctcaatccttacattgatttatttaatagcgaggtgatcagctatcatatctctaaacacacccctcttatcaatcaattgagactgctctaaataaagccgtagctgtgacatctgattgtccttatcgacgtactttccactcagatcaaggatggggataccaaatgagagactatgtttctaaattaagatctcatcgaatttttcagtctatgagccgtaaaggaaactgtcatgataattcagtcatggagaatttctttgggctacttaaacaagaaatttattatggacgtatcttctcgtctttcgaagaacttgagcaggttattgtaagctggattaggtactataatacaaaacgaatcaaacaaaaattgaactggatgagtccaattcaatttcgcttaaattaccaaaacaattaaaaaaatccaagtattttggaaaggttataataaactagacacaaagttaagagaaatcgtggaaaggtttattatggcaagaagaaaattcgataaacaatttaaaaattctgcagtaaaactcattcttgaagagggttactctgttaaagaagtcagccaagagcttgaggttcatgccaatagtctttatcgctgggttcaagaagttgaagaatatggagaaagtgcttttccaggcaatgggacagccctagctgatgcccaacataagattaaattgttagagaaagaaaatcgttatcttcaggaggaacttgaacttctaaaaaagttccgggtcttcttgaagcgaagcaagtaaaacgttttgaatttctcttgaaacatcatgggaagataaaaattaagcatgcagtaaaagttcttaaggtttctcgctcaggtttctatgaatacatgcatcgtcgtccttcaaaacaacaagtggagagagaaattctctcagagaagataaaagctgtctttcatgagcataagggacgctatggtgcggttagaattaccaaggtacttcataatactggtattatgaccaacacgaaacgtgttggaaaactgatgcacttgatgggactttatgccaagggaagccgttataaatataaacattacaacagaaaaggagcttcgctttcaagacccaatttaattaatcagatctttaaagcaacagctcctaataaagtatggctgggagacatgacctatatccctaccaaagaaggcaccttatacttagccgtgaatatcgacgttttttcacgtaagattgtaggctggtcaatgtcttcacggatgcaagataaactggtgagggattgcttcttacaagcttgtgggaaagaacatcctcagcctggcttgattgtccatactgatcaagggagtcaatatacaagctctcgttatcaatctactcttcgtcaagtcggtgctcaatctagcatgagtcgtaaaggaaatccctatgacaatgcaatgatggagtctttttataagacgctaaagagagagcttattaatgatgctcattttgagacaagagctgaggctactcaagaaatatttaaatacattgagacctattacaatacaaaaaggatgcattcaggtcttgattacaagtcgccaaaagactttgaaaaatataattcttaaattctcttaactccgtgtctagtttttcgttgactttccatttctacttggataaaaagtctaacttttggggtgcacatcaaggttcttttatttttatttcatcacaatataatccggtacggctcgatcatcttgactagcaacaatcgttttaccattgacagatagttgacttgagccaccactatcaagtaataacatattttggagcttcaaatttgatactgattttattatattatcataacctgcatttgtatcactcaaaatagcatagagattattatctttatcattcgcaataaaaatatgaatcttccaatctactgagccatcacttggttgaattttaccatcacggataattgcagtaccaaaatcataggcttgttgccctccgtttttaataatagttgaagcagatgtacttgaatcataaattttgcacgaaccatctttgttaataacaaaagcatattgagttgttgtacctggactccagtcttgaatcaactttccattattaatttgaaatccagctacttgtcctgtctgcatatcaaaagcggaagcattcataatcaaagcattaggatacttagctataacttctgacattttcatccgttgatctgtacgattggtaactgtttttaagactttcggattgttaattcgataaatagtgatattattcgtagataaatcagtaaatttatctagatttgccttcgagggaaccttaatccattctggtataccaacatcatctacaagtgctatactacccacagcagcttcttccccttttttctctacataaccattagaggccgaatttttggtcggttgatccgaactatttgttttcgtatgatcagtaagaataagtaaatctcttaaggcataagcccctgctcctataagggtaataataattaagataggtataattatagtccaaatattttttttttttgttttttttacgtaccacgatatcctccattaataaatatacttagaatggttctgttgcaaagtttcaatactgagtacaaaagtcccattctgatactttgactatgctggtatacccatcaaaactttaatttcagtagatgacgaaaagccgaagagcgttccatttcttcggttctttttgtatatgcctctcaatgcttctatgcccttaatcgtagttgatgcagtacgaagactttgataaagtttatttcgacgtttaacaggtctatgatcttgctcaattaagttattgagatacttgactgtccggtgctcagtttcgctgtatagcccctgcttttgtaacttcctaaaagcactagcaattgatggtgctttatctgtcacgataactttcggttccccaaactgcttgtatagtcgtttaaagaaagcataagcagattgagtatttctctttcgtcttagccaaatatccagtgtcatgccttctgagtcgattgcacgatagagataatgccacttccctttaattttaatataagtttcgtccattttccacgaataaaaggactgtctatttttctttttccagatttgatagatcagcttaccatattcttgaacccaacggtaagttgttgtgtgagaaacgttaatgccacgatcatataacatctcttgaacatcacgataactcaaattatagcgaagataatacccaacagagataataatcacgtcttgttggaattgtttgcccttaaaatgattcatctgttgtcctcgcattcttttttattacattttacaataaatcaggtgttatggggaactttgcaacagaagcataaatcgtagtatgacaaacatttattccacgatcatataacaattcctgaacttcacgatagcttagattgtaacgcaggtagtaaccaacagcgacaataatgacgtcttgttggaagtgtttgcctttaaaatgattcatcactctgtcctctctgtcttttttctcaattttacactaaaatagattttttggaaaactttgcaacagaacccctaaatccatacctctatttatgcataataaactttagcttattaattatttctgcctttaaaaatattaataaaacaacataaataattatgcccacagtaatttccaacagaatgaatatccaagatgtcggtgttaacaaactaattttaaagacaattagaaacatcactaatcctgcaattaaatacttagataaatccgaaaacagtgtatgcaaattaagctgtttatgaattataaaaagttgatacacagttacagacatttcagaaattacagttgcaattgatgcaccaacagtacctagatatataatcagtggaatatttaacattaaattgactatcgctccaatgatcactgacactgtatatgacttattttgattagttggtaaaagatattgagcacctattgcgttgctccaagctataaaaataattgcgattgactcgatcattaacacaggaataacatcactaaattgagatgtaaaaaaaagtggcacgaatttaggagtaatagctatcagaccaaacatcataggaatcgaaattgccgacacaaaagaaaaacctgcgtacatgtattctttaattttactatactctctatgtgcaaaggcatttgcaacacgtggcaacatgacagtacctgttgcagtagcaatagccaaaaccagtttaactattttatcagactgatcaaaaaagccggagctcgtgacagaatccaatgaacctaacattgttttattcaaaacccaataaatttggacagcaatttgtgggataaacataactaaagattgctttaaatgctttattggccttaattcacgatagttaacctttacgagatatctgtgtaaacttgggaaaaaagttaaattaccaattaatgtagataaaactgttatcaatatatatatattcaaatcattgtaagatttgacaaataggaaaacactgaatagagcaagtaacttaactataaaatttcttaatacagttactttaaaattttcaattcccataaaaaaccaagtgatatcaaatgcagctgcaactatagcaatggattgagacaaatagtatgcatgatactgaccattaatggttaaaaaagcaacgaacaaaaaatatgctaaacatattgtaaatagtcttaaaataaatatttcataaaagactttagacattttgagctgattatccctaacaaaggcaatctgacgattcccatacaaaccgactcctatactaccaaataaaacaaaatactgaacaatagaattggtatatgagttaattccaatacctgaagggcccaaaattcttgacaaataaggaatggtaagtaatggcacaattattataaagacctgatatattgcattataaagataattttttgcaatttgcat

SEQ ID NO: 200 - protein, 105 aa, Lactococcus lactis
  33135_EpsR
MNDLFYHRLKELVESSGKSANQIERELGYPRNSLNNYKLGGEPSGTRLIGLSEYFNVSPKYLMGIIDEPNDSSAINLFKTLTQEEKKEMFIICQKWLFLEYQIEL

SEQ ID NO: 201 - protein, 255 aa, Lactococcus lactis
  33135_epsX
MMKKGIFVITIVISIALIIGGFYSYNSRINNLSKADKGKEVVKNSSEKNQIDLTYKNYYKNLPKSVQNKIDDISSKNKEVTLTCIWQSDSVISEQFQQNLQKYYGNKFWNIKNITYNGETSEQLLAEKVENQVLATNPDVVLYEAPLFNDNQNIEATASRTSNEQLIKNLASTGAEVIVQPSPPIYGGVVYPVQEEQFKQSLSTKYPYIDYWASYPDKNSDKMKGLFSDDGVYRTLNDSGNKVWLDYITKYFTAN

SEQ ID NO: 202 - protein, 259 aa, Lactococcus lactis
  33135_epsC
MQETQEQTIDLREIFKIIRKRLGLILFSALIVTILGSIYTFFIASPVYTASTQLVVKLPNSDSSAAYAGQVSGNIQMANTINQVIVSPVILDKVQSNLNLSDDSFQKQVTAANQTDSQVITLTVKYSNPYMAQKIADETAKIFSSDAAKLLNVTNVNILSKAKAQTTPISPKPKLYLAISVIAGLVLGLAIALLKELFDNKINKEEDIEALGLTVLGVTTYAQMSDFNKNTNKNGTQSGTKSSLPSDHEVNRSSKRNKR

SEQ ID NO: 203 - protein, 230 aa, Lactococcus lactis
  33135_epsD
MAKNKRSIDNNRYIITSVNPQSPISEQYRTIRTTIDFKMADQGIKSFLVTSSEAAAGKSTASANLAVGFAQQGKKVLLIDGDLRKPTVNITFKVQNRVGLTNILMHQSSIEDAIQGTRLSENLTIITSGPIPPNPSELLASSAMKDLLDSVSDFFDVVLIDTPPLSAVTDAQILSSYVGGVVLVVRAYETKKESLAKTKKILEQVNANILGVVLHGVDSSESPSYYYYGV

SEQ ID NO: 204 - protein, 254 aa, Lactococcus lactis
  33135_epsB
MIDIHCHILPGIDDGAKTSGDTLTMLKSAIDEGITTITATPHHNPQFNNESPLILKKVKEVQNIIDEHQLPIEVLPGQEVRIYGDLLKEFSEGKLLTAAGTSSYILIEFPSNHVPAYAKELFYNIQLEGLQPILVHPERNSGIIENPDILFDFIEQGVLSQITASSVTGHFGKKIQKLSFKMIENHLTHFVASDAHNVTSRAFKMKEAFEMIEESCGSDVSQIFQNNAGSVILNESFYQEKPTKIKTKKFLGLF

SEQ ID NO: 205 - protein, 228 aa, Lactococcus lactis
  33135_epsE
MEVFEDVSSPEPEEHKLVELKKFSHREIIIKRGIDILGGLAGSVLFLIAAALLYVPYKMSSEKDQGPMFYKQKRYGKNGKIFYILKFRTMILNAEQYLELHPEVKAAYHANGNKLENDPRVTKIGSFIRQHSIDELPQFINVLKGDMALVGPRPILLFEAKEYGERLSYLLMCKPGITGYWTTHGRSKVLFPQRADLELYYLQYHSTKNDIKLLMLTITQTIHGSDAY

SEQ ID NO: 206 - protein, 216 aa, Lactococcus lactis
  33135_GT1
MKEKHIYIIGSKGIPAKYGGFETFVEELTAHQSNKNLKYHVACLSNDIQSNFIHNGADCFNIPKKNIGPANAIYYDLAALKYSLKEIEEKNYMGAIIYILACRIGPFIGHYKKQMKKLGITLMVNPDGECEIIWTTRKSLNSYGFARLDLFTSTCFCLSWCVAAGFIGSNLVKRIYQEAPSATVIGIDNMNAYYDVALKEFRLNELAKYPTFTFYG

SEQ ID NO: 207 - protein, 303 aa, Lactococcus lactis
  33135_dTDP-glucose_4,6-dehydratase
MSWPSIPHLPFMDNPNFRFVKADICDREAVNKLFEEEHPDIVVNFAAESHVDRSIEDPGIFLQTNIIGTSVLMDACRKYGIRRYHQVSTGEVYGDLPLDRPDLFFTEETPIHTSSPYSSSKAAADLLVLAYHRTYGLPVTISRCSNNYGPYHFPEKLIPLMIANALADKPLPVYGEGLNVRDWLYVEDHCKAIDLIIHKGRVGEVYNVGGHNEKQNIEIVKIICKELGKPESLITHVGDRKGHDMRYAIDPTKIHNELGWLPETKFEDGIKKTIQWYLDNREWWETIISGEYQNYYEKMYSNR

SEQ ID NO: 208 - protein, 304 aa, Lactococcus lactis
  33135_dTDP-4-dehydrorhamnose_reductase
MKFFVTGVGGQLGHDVMNELLKRGHEGVGSDIQENYSGVADGSAVTKAPYFALDITNKDAVEKVITEVNPDAVIHCAAWTAVDMAEDDDKVAKVRAINAGGTRNIADVCKKLNCKLTYISTDYVFDGQGTEPWQPDCKDYKPLNVYGQTKLEGELAVSQTLEKYFIVRIAWVFGLNGKNFIKTMLNVGKTHDTVRVVNDQIGTPTNTYDLARLLVDMNETEKYGYYHATNEGSYISWFDFTKEIYRQAGYKTEVLPVTTAEYGLSKAARPFNSRLDKSKLVEAGFTPLPTWQDALSRYLKEIEQ

SEQ ID NO: 209 - protein, 223 aa, Lactococcus lactis
  33135_dTDP-4-dehydrorhamnose_3,5-epimerase
LAGCTEPLSERNRAVIEEIEKMGQIKVDKNVGGIEGLCVIEPAVHGDARGYFMETYNEKDMKKAGIDIHFVQDNQSMSMKGVLRGLHFQKQYPQCKLVRAVRGTVFDVAVDLRSNSETYGKWYGVTLSAENKKQFLIPEGFAHGFLVLSDEAEFCYKVNDFWHPNDEGGMAWNDPEIGIEWPGVQGEYKGSASAEGYELEDGTALNLSDKDQKWLALKDTFKF

SEQ ID NO: 210 - protein, 410 aa, Lactococcus lactis
  33135_GT2
MQRENEVQHVFLVGAKSLGAYGGYETFVYKLTEHHQNKKNIKYHVACKANGDGCMDETKVDGVKGINQHEFEFHNAHCFKIDIPQIGAAQAIYYDVAALNACCKYIKEHKIKHPIVYIMACRIGPFAGHFYQEIHKLGGTVYLNPDGHEWMRAKWSAPIRKYWKISERMMVKYCDLAICDSVNIEKYIHECYDGKGIKGRNPKTTFIAYGADLTLSKLADDDEKLVNWYKEKGLAKKGYYLVVGRFVPENSFEVMIREFMKSGSKKDFALITNVNDKFLNELEEKLHFKSDKRIKFVGTVYDQELLKKIRENAYAYFHGHTVGGTNPSLIEALGSTDLNLLVDVGFNKEVAEDCALYWSREPGSLARLIDRADKMSTEEIAEMGRKAKKRVAEEYTWDKICGQYEEVFTK

SEQ ID NO: 211 - protein, 209 aa, Lactococcus lactis
  33135_DUF1919
MRDQTVKISKYYRTFLRRKLNAENRKRLKNKNFTVLCNNCVGGVILHELGERFNSPTVNLFFKAEDYLKFLENLDYYLKQALVEVGSEKNYPVAKLDDITIYFMHYSSFDEAKITWQKRVARINKNNLYVIFVQQSGCTEQVLEAFDKLPYKHKLALTAKPMPEIKCSYCIHGTAQPNGEVMDLCKYEGKFTGKRWIDEYDYVGFLNKK

SEQ ID NO: 212 - protein, 371 aa, Lactococcus lactis
  33135_UDP-galactopyranose_mutase
MYDYLVVGSGLYGAIFAHEAKAHGKSVLVVDKRPNIGGNVYTENIEGINVHKYGAHIFHTNNKKVWNYITQFAEFNRFTNSPVANYKGELYSLPFNMYTFNKMWGVVTPEEAAAKIEEQRKEITGEPKNLEEHAISLVGRDIYEKLIKGYTEKQWGRDCKDLPAFIIKRLPVRLTFDNNYFNALYQGIPIGGYTKMIANLLDGIEVRLNIDYLENKVELDALAGKVVYTGPIDAYFDYKLGTLEYRSVRFENELLDKPSSQGNAAVNYTDRETPWTRIIEHKWFEFGRDENGNDLPKTIISREYSSEWKPGDEPYYPVNDAKNSLLYSEYKKLADAESKVIFGGRLGEYKYYDMDQIIAAVLERCEREFDV

SEQ ID NO: 213 - protein, 252 aa, Lactococcus lactis
  33135_DUF4422
MNGKIIVVTHKEYKMPCDTVYLPVCVGVGRDALRNKYQADDEGENISDKNILYCELTALYWAWKNLNCDYIGLAHYRRYLTESKRSKNIEDALSQHRIEELLMDYDIIVPREKRYSQTIADHYINCIKSRKDAHKIHLQLLRDSILEVAPEYIAEYDKTMNGHSAHMLNMFVMKKQNLDNYCEWLFKILFVLEKKIYDHDVYYDRIMGAFSEFLLDVWIRTNKKTYIEVELIETERDYWGKIKWALKRKLFE

SEQ ID NO: 214 - protein, 449 aa, Lactococcus lactis
  33135_GT3
MRILHYSLGFPPYRRGGLTKYCLDLMVAQEMQGNVVAMCWPGEIGIIKKKKVAIKKRKKYSIGKSKIENYEIQGILPVPLLEGIKNPDLFTEKKNQEIWKLFLKNWRPDVIHFHTLMGLPLEYVETARKLGIKTLFTTHDYFGLCPRTTLVRQNGEICDGCTPELCAECCENAISYRKLKILQSSVYRVLKDLVIVKKLRKKHWNESKNDSAQHQASVQNAQRAEEYVELRKYYIKLLKSFNIIHFNSSNTRDVYLKAAKEVLNNEVVSISHEMIKDNKKKKRKHEILHLSYLGPDTYNKGYYVLKETLNQLHKEGYKFQLNIYFEDASEPFIVSHAPYQYSELGKVMDDADCVILPSLGNETFGFTVLEALSYGVPVIVSSRVGAKDIVEEGKNGFVVEGDVDSLKTKLTSVLNQPEILEDMNNYIVANTHIKTMTEHSKEIKDLYQK

SEQ ID NO: 215 - protein, 308 aa, Lactococcus lactis
  33135_GT4
VQDKVSIIVPVYKVERELDRCVQSLIKQTYKNLEIILVDDGSPDQCPELCENYAEIDKRVKVIHKENGGLSDARNAGLKQATGKYILYVDSDDYIDLDACERFIKAAGNQKIDIVVGNAIMEKPDGKEMMIHSATPSGITYTAKQFIMSAVKAYQWYAPAWLNMYRRDFLLDNQLYFKKGIYFEDVQMLPRVFLAAKKITCIYGTFYHYIIRENSIMTSQKDEKKKNDSIQNMKEWKEQFDLVDDVALKKCLYGMLVKMYIHECRQYGITTKAIEGMDDRFILGNCLNYKERLKATMWLCFPRLLIKQ

SEQ ID NO: 216 - protein, 367 aa, Lactococcus lactis
  33135_wzy
VHMSVYIFLWVAVVVFGFIASRSNYKAKYFVLFSFFLMTIVLGLRGATVGEDTKMYLNIAERVTNISWKEVFSSFPTSQWRYISYGGLSGFSEQTETVYLAYCKLIMLIFHNAQAVLLITAAITNALFAKFILDNITVKQDAILAVYIYMCDAMFMNSFNTMRQILAISIAVQSIELIKKEKYKKAIACVLLAACFHQSAIVFFVADLFYLLKKKKERYIYLLVTLCALPVLIPVAIKVVSIFSSKYASYLSVSFWGAQLRGTLLLWIIIAIVLFIMIRANQSDNIDWWLIYMATIYIGVELVGMQLTVISRVAMYFRIFLVLLFPIAQKYFTKKSGQFYKIGVVMLMTVSFFSYASSPDRLYTFCF

SEQ ID NO: 217 - protein, 326 aa, Lactococcus lactis
  33135_GT5
MDLKDLISVIVPIYGVEEYLNKCIDSIINQTYKNLEIILVDDGSPDKCPDICDTFEKKDERIKVIHKKNGGLSDARNAGIDTAHGDYFVFVDSDDWIENTMVEHLLFACKKYNVEMATCARYITDGHSTRAVAFNGPAGAYSAEEALNEILLGKSMDVAAWDKIYARNLFEEIRFPVGENNEDIAVFYKLVDLAGRVAHTGTTEYFYRSRPGSITKLKYSTDARKIIEKNLNSIEKFLDKKYPSCLPSFYRYKTMNIYALLNKYIKCEGTKKTQEFEHLMNEFRKNKSYFFNDDQTPSKEKKIAIMILLHLYNPYLLVKEKITGYK

SEQ ID NO: 218 - protein, 300 aa, Lactococcus lactis
  33135_lytR
MNQKKRRHYRKKKHTVLKVISIIFVLVIIAVVSIAYAAYRNVESTFSTSYENFPKTTSIDLKKSKTFTTLIIATGKNNSKNTAYATVLASTNVKTNQTTFMNFPVFATMPNQKTITEVYNTNGDDGIFQMVKDLLNVSINKVVQIDVNKMGSLVQATGGITMQNPKAFNAEGYEFKQGTVNLQTADQVQAYMTQIDDTDLDASITRIQNVSMELYGNIQKIAHMKKLESFNYYREILYAFSNTVKTNISFNDAKTIVMSYNKALKNTSKLNLHTTDENGAKVVSQTELDSVKTLFEKSLK

SEQ ID NO: 219 - protein, 232 aa, Lactococcus lactis
  33135_epsL
VGSIALVDDVGIPEWIKVPSKANLDKFTDLSTNNITIYRINNPKVLKTVTNRTDQRMKMSEVIAKYPNALIMNASAFDMQTGQVAGFQINNGKLIQDWSPGTTTQYAFVINKDGSCKIYDSSTSASTIIKNGGQQAYDFGTAIIRDGKIQPSDGSVDWKIHIFIANDKDNNLYAILSDTNAGYDNIIKSVSNLKLQNMLLLDSGGSSQLSVNGKTIVASQDDRAVPDYIVMK

SEQ ID NO: 220 - protein, 471 aa, Lactococcus lactis
  33135_wzx
MQIAKNYLYNAIYQVFIIIVPLLTIPYLSRILGPSGIGINSYTNSIVQYFVLFGSIGVGLYGNRQIAFVRDNQLKMSKVFYEIFILRLFTICLAYFLFVAFLTINGQYHAYYLSQSIAIVAAAFDITWFFMGIENFKVTVLRNFIVKLLALFSVFLFVKSYNDLNIYILITVLSTLIGNLTFFPSLHRYLVKVNYRELRPIKHLKQSLVMFIPQIAVQIYWVLNKTMLGSLDSVTSSGFFDQSDKIVKLVLAIATATGTVMLPRVANAFAHREYSKIKEYMYAGFSFVSAISIPMMFGLIAITPKFVPLFFTSQFSDVIPVLMIESIAIIFIAWSNAIGAQYLLPTNQNKSYTVSVIIGAIVNLMLNIPLIIYLGTVGASIATVISEMSVTVYQLFIIHKQLNLHTLFSDLSKYLIAGLVMFLIVFKISLLTPTSWIFILLEITVGIIIYVVLLIFLKAEIINKLKFIMHK

SEQ ID NO: 221 - DNA, 27175 bp, Lactococcus lactis
  DSM 33139 eps gene cluster, complete sequence
atggatgatttattttaccatcgtctaaaggaactagttgaatcaagtggtaaatctgcaaatcaaatagaaagggaattgggttaccctagaaattctttgaataattataagttgggaggagaaccctctgggacaagattaataggactatcagagtattttaatgtgtctccaaaatatctgatgggtataattgatgagcctaatgacagttctgcaattaatctttttaaaactctaactcaagaagagaaaaaagaaatgtttataatttgtcaaaaatggctttttttagaatatcaaatagagttataacaataataaatttagggagtttttcttattaatatgatgaaaaaaggaatttttgtaattactatagtgatatctatagcatttataattgtaggtttttatagttataattctaggataaataatctttcaaaagctgataaaggaaaagaagttgtaaaaaatagcagtgaaaaaaatcagatagaccttacctataaaaagtattataaaaatttaccaaaatcagttcaaaataaaatagatgatatttcatccaaaaataaagaagttactttaacttgtatttggcaatctgattcagttatttctgaacaatttcaacaaaacttacaaaaatattatggaaataagttttggaacatcaaaaatatcacttacaatggcgaaactagtgaacaattattggctgaaaaagttgaaaaccaagtattagccactaatcctgatgttgttttatatgaagctccactttttaatgataaccaaaacattgaagcaacagcctcactgactagtaatgagcaacttataacaaatttggctagtgcaggagcggaggtaatagttcaaccctctccaccgatctatggtggtgttgtgtaccccgtacaagaagaacaatttaaacaatctttatctacaaagtatccctatatagactactgggctagttacccagacaaaaattctgatgaaatgaaggggctgttttctgatgatggagtatatagaacattaaatgcttcggggaataaggtttggctagattatattactaaatattttacagcaaactaattaagttataaataacaattattaaatattggagaagaaatgcaggaaacacaggaacaaacgattgatttaagagggatttttaaaattattcgcaaaaggttaggtttaatattatttagtgctttaatagtcacaatattagggagcatctacacattttttatagcctccccagtttacacagcctcaactcaacttgtcgttaaactaccaaatttggataattcagcagcctacgctggacaagtgaccgggaatattcaaatggcgaacacaattaaccaagttattgttagtccagtcattttagataaagttcaaagtaatttaaatctatctgatgactctttccaaaaacaagttacagcagcaaatcaaacaaattcacaagtcattacgcttactgttaaatattctaatccttacgttgctcaaaagattgcagacgagactgctaaaatttttagttcagaagcagcaaaactattgaatgttactaacgttaatattctatccaaagcaaaagctcaaacaacacccattagtcctaaacctaaattgtatttagcaatatctgttatagccggattagttttaggtttagccattgctttattgaaggaattgtttgataacaaaattaataaagaagaagatattgaagctctgggactcacggttcttggtgtaacaacctatgctcaaatgagtgattttaataataatacgaataaaaatggcacgcaatcgggaactaagtcaagtccgcctagcgaccatgaagtaaatagatcatcaaaaaggaataaaagataggagttcaggatggctaaaaataaaagaagcatagacaataatcgttatattattaccagtgtcaatcctcaatcacctatttccgaacaatatcgtacgattcgtacgaccattgattttaaaatggcggatcaagggattaaaagttttctagtaacatcttcagaagcagctgcaggtaaatcaaacgagagtgctaatctagctgttgcttttgcacaacaaggtaaaaaagtacttttaattgatggcgatcttcgtaaaccgactgttaacattacttttaaagtacaaaatagagtaggattaaccaatattttaatgcatcaatcttcgattgaagatgccatacaagggacaagactttctgaaaatcttacaataattacctctggtccaattccacctaatccatcggaattattagcatctagtgcaatgaagaatttgattgactctgtgtccgattcctttgatattgttttgattgatactccacctctctatgcagttactgatgctcaaattttgagtgtatatgtaggaggagtggttcttgttgtacgtgcctatgaaacaaaaaaagagagtttagcaaaaacaaaaaaaatactggaacaagttaatgcaaatatattaggagttgttttgcatggggtagactcttctgagtcaccgtcgtattactactacggagtagagtaattggaataaattttaatcaaataaaagacagaaatttgtagaagaggggagcaaatgattgatattcattgccatattttaccggggatagatgatggagctaaaacttctggagatactctgacaatgctgaaatcagcaattgatgaagggataacaactatcactgcgactcctcatcataatcctcaatttaataatgaatcaccgcttattttgaaaaaagttaaggaagttcaaaatatcattgacgaacatcaattaccaattgaagttttacccggacaagaggtgagaatatatggtgatttattaaaagaattttctgaaggaaagttactgacagcagcgggcacttcaagttatatattgattgaatttccatcaaatcatgtgccagcttatgctaaagaacttttttataatattcaattggagggacttcaacctattttggttcaccctgaacgtaatagtggaatcattgagaacccagatatattatttgattttgttgaacaaggagtactaagtcagataacagcttcgagtgtcactggtcattttggtaaaaaaatacaaaagctgtcatttaaaatgatagaaaaccatctgacgcattttgttgcatcagatgcgcataatgttacgtcacgtgcatttaagatgaaggaagcttttgaaatgattgaagatagttatggttctgatgtatcacgaatgtttcaaaataatgcagagtcagtgattttaaacgaaagtttttatcaagaaaaaccaacaaagatcaaaacaaagaaatttttaggattattttaaagggattaaatggagtaaataatggaattttttgaggatgcctcatcacctgaatcggaagagcctaagttagtagaattaaaaaatttttcttatagagagctaattataaaaagagcaattgatatcctaggaggattagcaggttcagttttatttcttatcgcggctgcattgctttatgtcccttacaaaatgagctcaaaaaaagatcaagggccaatgttctataaacaaaaacgctatggtaaaaatggtaaaattttttatattttgaaatttagaacaatgattcttaatgccgagcagtatctagaacttaatccagatgttaaagctgcttaccatgccaacggcaataagctagaaaacgatccacgggtaacgaagattggctcatttataagacgacactcaattgatgaactgccacaatttatcaatgttcttaaaggggatatggcattagttggtccaagaccaattttgctttttgaagcgaaagaatatgggaaacgcctcgcttacttactcatgtgcaaaccaggaatcactggttattggacgacacatggtcgaagtaaagttctttttcctcaacgagcagatttagaactctattatctccagtaccatagcaccaaaaatgatatcaagcttctagtactcacaattgcacaaagtattcacggatcggacgcttactaaaaaatgaaggaaaaacatatttacattattggttcaaaatggaattccagcaaagtatggtggttttgagacttttgtagaaaaactaacggcacatcaaagtaataaaaaccttaagtatcatgttgcttgtttatcgaatggtatacaagaaaattttaatcataatgatgcagactgttttaatatttcaaagaaaaatattggaccagcaaacgccatttattatgatttggcagctttaaaacactcacttaaagaaattgaagaaaaaaattatatgggtgcaattatttatattttacttgccgcattggtccgtttattggtcactataaaaagcaaatgaaaaaattaggaattactttgatggtaaatcctgatggggagtgtgaaataatatggacaaccagaaaaaagcctgaattcatgcgggtttacgcgacttgaccttttcacctcaacttgtttctgcttgtcatggtgcgctagggctagcgtgtttttaggggttaatggcttctggttgcgctctatacttaacccaccacagcgaaagctgatagagcagaaaacagaatgaggaggtacgaggacaagcctgcgtatagattgttgctgcaatctgtatacaggcttgttgttgtgatatgaagtaggaaaggtgaatagtgaaagacgagtatgacaatttaaggaaaagaactgatgggattgtgtataaacctaggaaaagaatagaaactatggaatgacggttggagagaattaatggaagaaaaaatcagacttgcggttttcggacagaaacgtctttctcgtgaaggcggaatagagattgttgtaaaagagttatgcacccgaatggcacagaagggttgtgatgtaacttgctacaatagagcaggccatcatgtgagtggtgcagagtatgacaaaacaattgaatatgatggtatccgtcaaaaggttgttccgactattgagaagaagggacttgcggcggtaagctcctcctttttcgcagcactttgtagtgcatttggaagatacgatgtggtgcatatccatgcggaaggtcctgcctttttctgttggataccaaaactttttggcaagcgtgtaatcagcactattcacggtttggactgggcccgcgaaaaatggaaatttggcgttggatctaaatttatccggcagggtgaaaaaaatgccgtgaaatatgcagatgaaatcattgttctaagcaaaggcgttcagaaatatttcatggagacctacggaagggagacacattttatccctaatagtgtcaatcggccagaggttcgggaggcaaagctgatcacggatcattttggactggaaaaggattcctacatactgttcctcggtcgtctggtgccggagaaggggattcgatatctggttgaggcattcaagaatgtcaagacagataaaaaactggtcatcgcaggtggctctagtgatacggattcctttatggaggaattgaaagaactggcgaagggtgacgatcggattctctttactgggtttgtgcagggagcaatgctggatgaactgtacagcaacgcttacatctacacgctgccgtccgatctggaaggaatgccattaagtctgctggaggcgatgagctacggaaattgctgtctggtatccgatattccagaatgtgcagaggttgtggaagataaggcattgattttcaaaaagtcagatgtagaggacttgcgagaaaaattgcaagatgcctgtgaccatccagaaatggttataagaatgaagaatcaggcagctgactttatctgcgagaaatacaactgggataaagttgtaaaggaaacgatgaaactgtacaggagaaaataatagatgagagtattgataataaataatctcctttaaccgaacgcaggtagtgagatgtacatagtgaaagcgccgtaaaaatagcgtatttacggcacttcttgagagacgggtagagctgcgagagcagtttttatctcgctacctaggttcagtaacagcagatgattttatcataagaactttcagtatcactacctgcgtttgtatggagcactctggtttatgaataacacattggaagtgcttcatctgaacagaggtagtgacacttgatatatacgcttcaaaaataaggagacgaatgcaatgagtatagtaactttagataaaaaaacgattttagtcacaggtgcagccggttttataggctccaaccttgtgaaacgaatctatcaggaggctccttctgctacggtcatcggcatcgacaatatgaatgcctactatgatgtggcactgaaagaattccgcctgaacgagctggccaagtatcccacattcacttttgtaaaaggcaacatcgctgataaggcactgatcaccgagctgttcgagaagtacaagccgtctgtggtcgtcaaccttgcagcacaggctggtgtgcgctactccatcaccaacccagatgcttatgtggaatctaacttggtcggcttctttaatatcctcgaagcctgccgtcattgtgagagtctggagcatttggtttatgcttcttcctcctccgtctatggttctaataaaaaggttccatacagcacggatgacaaggttgacaatccggtttccctttatgcagcaaccaagaaatctaatgagttgatggcacacgcatactccaagctctacaacattccttccactggcctgagattctttacggtgtatggccctgcaggtcgcccggacatggcttacttcggattcaccaacaagctggtgaagggcgaaaccatcaaaatcttcaactatggcaactgcaagcgtgattttacttatgtggatgacatcgttgagggcgttgttcgtgtgatgaagaaagcaccagacaagaagaatggtgaagatggtcttccgattccgccgtatgcagtttacaacatcggcaatcagaatccggagaacctgctggactttgtgcagattctgagcgaggagcttgttcgtgcaaaggtgctgccggaagattacgatttcgaggctcataaagagctggtcccgatgcagccgggtgatgtgcctgtgacctatgcagatacgagtgcactggagcgcgacttcgggtacaagccgagcacaagtctgcggactggattaagaaagttcgctgagtggtacgctgagttttataaataaaagaattagagggatagagaaatgagagagtttaaagatttaaagattgctgttgccggaacgggatatgttggtctttctattgctacgctgttatctcagcaccacaaggtgactgctgtggatatcattcctgagaaagttgaacttatcaataataagaaatctccgattcaggatgaatatattgaaaagtatctggcagagaaagagctggatctgactgcgactctggatgctaaggaagcatacagtgatgctgattttgtagtgatcgcagctcctacaaattacgatagcaagaagaacttttttgacacgagtgcggtagaagccgtcattaaactggtcatcgagtacaacccggaagctatcatggttatcaagagcactattccggttggttatacagcaagcgttcgtgagaagttccactgtgacaatattatctttagcccggagtttttgcgcgagagcaaagctctgtatgataacctttatccttcccgtatcattgtcggtacggatgttgacaatgttcgactggtaaaggcggcacacacttttgcagagctcctgcaggaaggtgctattaaggaaaatatcgatactctgtttatgggctttaccgaggcagaggcagttaagctattcgctaacacttatttggcactgcgtgtcagctacttcaatgaactggacacttacgcagagatgaagggactgaacactcagcagatcattaatggtgtttgcctcgaccctcgtatcggcactcattataacaatcctagctttggttacggcggatactgcctgccgaaagacaccaagcagctgctggcaaattatgcagatgtgccggaaaacctgattgaggctatcgttgaaagtaatagaacaagaaaagacttcatcgctgaccgtgttctggagattgcaggtgcttatgaagcaaatgacagctgggatgagagcaaagaaaaagaagttgttgtcggcgtttaccgtctaacaatgaagagtaacagcgataacttccgccagagttccattcagggtgttatgaagcgtattaaggccaagggtgcaacagtcatcatctatgagccgaccctgaaggacggcgatactttctttggtagtcgagttgttaataatttagagaagttcaaaaaacagagccaggcaattattgcgaaccgttacgacaagagcttggatgatgtgaaggataaggtttatacacgcgatatttttcaacgggactaatggattaaaaggagattcattatgaaaggcgttattttagccggaggttcaggcacacgtctttacccattaacgaaagtaacaagtaaacagcttttgccaatctacgacaaaccgatgatttattatcctatgtctgttctgatgaacgctggcatccgcgatattttgattatttccacaccgcaggatacacctcgctttgagaatctgctgggtgatggacaccagtttggtgtgaatctgacctatgcggttcagctgtctccggatggactggcacaggcctttatcattggtgccgactttatcggtgccgattctgtagctatggtgctgggcgataacatctttgcgggccacggattgaagaagagattaaacgcagcagtggaaaaggcagaaaacggcaagggtgcaacggtgtttggctactatgtggacgatccagagcgttttggtatcgttgagttcgataagaacggtaaggccatttctatcgaggagaagccagaacatccgaagagcaattactgtgtcaccggtttgtacttctatgataaccgtgtggtcgagtttgctaagaacctgaagccgtccgctcgtggtgaattagaaattaccgatttgaaccgtatttatctggaagatggtactctgaatgtagaattgctgggtcagggcttcacttggctggacactggaacacacgagagccttgttgatgctaccaactttgtaaagaccgtggaacagcatcagcatcgtaagattgcctgtctggaggaaatcgcatatctgaatggctggattagcaaggatgagctgatggaggtctatgaggttatgaagaagaaccagtatggacagtatctgaaggatgtcatggacggcaagtatcaggagcatttgtattaataaaagaagaaccaaaagataagtgtataggagaatagatcatgaatattattgttaccggcggtgcgggttttattggtagtaactttgtgttccacatgctgaagaagtatccgggttatcgaatcatctgtttggacaagctgacctatgcaggcaatctgtccacactggcccctgttatggataacccgaatttccgcttcgtgaaggctgatatctgtgaccgcgaagcagtgaataaactgtttgaagaagaacatccggacatcatggtcaactttgcggcagagtctcatgttgaccgttctatcgaagatcccggcatcttccttcagactaacatcatcggtaccagtgtgctgatggatgcttgccgcaagtacggcatccagcgttaccatcaggtttctactgatgaagtttacggtgacctgcctctggatcgtcctgacctgttcttcaccgaggagactccgatccataccagctctccgtatagcagctccaaagctgctgctgacctgctggttctggcttaccaccgtacctacggcctgcctgtgaccatttcccgttgttccaacaactatggaccgtatcacttccctgagaagctgattccgctgatgatcgctaatgctctggctgacaagccactgcctgtttacggcgagggtctgaacgtccgtgactggctgtatgtggaagatcactgcaaggccattgatctgattatccacaagggtcgtgttggtgaagtctacaacgtcggcggtcacaacgagaagcagaatattgagatcgtgaagattatctgcaaggagctgggcaagccggaaagcttgatcactcatgttggtgatcgcaagggtcacgatatgcgttatgctattgatccgaccaagatccacaatgagctgggctggttgccggagaccaagtttgaggacggcattaaaaagaccatccagtggtatctcgataatcgtgagtggtgggagaccatcatcagcggtgagtatcagaactattatgagaaaatgtacagcaaccgctaagaaaccacaagaaaaggataagaagttttttataacaggcgttagcggctagtttagtcatgatatgatgaatgatctgctgagacaatcgtgaaggtgttgactattgtatataggaaaattacagtagtgtgtttgattaatttgcgataatgaaatatattctgctttcgatatggtagattgcacttggcagttatctaaaaatgagcagtgaaggagatgtagaaaatgggacagattaaagttgaaaaaaacgtaggcggtatagagggactttgtgttattgaaccggttgttcatggtgactcccgtggttatttcgtggagacttacaacgagaatgatatgaaggaagctggtataggtattcactttgtgcaggacaatcaatctatgtccacaaaaggggtgttgcggggattacactttcagaagcaatatccgcagtgcaaattggtgcgtgttgtgaacggtacggtgtttgatgtcgcagttgatttgagaagtaattccgaaacttatggtaaatggtatggtgttgttttgtccgccgagaacaagaaacagttccttattccggagggctttgcacacggcttcttagttctgagcaatgaagcagaattctgttataaggtcaatgatttttatcatccgaatgatgagggcggaatggcttggaatgaccctgaggttggaattgaatggccacaactgaagggcgaatacaagggcaatgcaagtgcagaaggatatacgctggaagacggtacagcgctgaacctgagcgataaggaccagaagtggctcggactgaaggatacttttaagttctgaaaggagaaataaatatgaaaattttagtaactggtgcaaacggctatctggggcagggtattgtaaaggagcttctagataacgggcataatgttgtggctgcggattttaagaccacgtatgttgatgaccgagcagaaaagatagattgtgacttgttctcggtagaagaaccctatacatactttggtaaaccggatgctcttcttcatttggcatggagggatggatttgttcattactcggaaaaccatattgcggatttaccaaaacattatcatttcttgaagcaaatggttgaagctaatatcttcaagattagtgttatgggaacgatgcacgaaattggtttctttgaaggtagtattaatgaaaatactccttgccatccgatgagtctctatggcatcggcaaagatgctctgcgcaactgtgtggcgatgatgactaatggtaaacacacaaaatggcaatggttacgtggctattacatcgtcggacattctgagtttggatgttctattttttcaaaaattaaggcagcagaaaaagagggtaaaacagaatttccgtttaccatgggtcaaaatcagttcgattttatagattatgaagatttctgtaaacaggttgctgcagctgttggtcaggatgaaattaatggaattatcaatatctgttctggtaaaccggaaaagttggctgatcgtgtagaaaggtttattaaggaaaatggatacggtattaaattgaaatatggagcatttcctgatcgtccatacgattcaaaggccgtttggggagataataataagataagaaaaattatgcagaataattgatttaaagagtgaatgaagacgaattatatttaatagtgcataagttgcaatttgtaagtctgtttgttgaaaaatacatagaagaccatgaataactaggaatagtttgtgcgatttggaaacgtactaaactaggaaaatatatttatttagcctttgtttactaaaagaatatgtatttaggttatactaggacatattgtataagaggaggagagaatgaaaatactatttcacataagttcactttttggtggtggagctgaaagagttatgtcctatttgattaatcacaattgtgaactaaataatgaagtttatattgtggtttgttatgagaaggaaggtgagtattatatttcacctaaagcaaaaaaaattgtaataggaacacatagcattgtttctcaatctctagaattaagaaagacaataaaaagaattaaaccagatatatgtgtaagttttatgcaaggaggaaatatcagactttctctagcttgcatgggtttaaaacaaaaatatattctgtcagtaagaaatgatcctaaaaaagaatatccaaatgcgattatgcaaaaattggtgcggtattggtttgatgcagctgacggagttgtgtttcaaacagaagatgcaaaaaagtttttctgcagtagcgtgcagaataaatcgagtataatatacaatcctgtatcaaaccagttttttatagagaatgtgtcaaaagatactactggaatagtagcgttcggtcgtctggttgatcagaaaaactttgcgatgttaataaaagcatatgccgtgatagcagatagaatcgatgatgatttatatatatacggcgaaggccccttagagaaaaggttatatgaaatcattaattcaaccggacttgcaagtcggattcacttaatgggccggactaataatgtgccagaagtacttaaaacagcaaaagtgtatgctttaagctcggattttgaaggtatgcctaatgcattgctggaagctgtatgtatgcttgtgccggtagtttctactgattgcccttgcggtgggccaaaagagatttgtaacaatgcgtgtggtctattgagcccagttggggatgtagaatcttttgcaaataatctttacaaagtttcccacagcgaacaattaagagaacaattagtcaaaaaatgtattgaacgaagagctgcgttttcaaatgattctatactgaaaaagtgggatgcattttttgataaagtgtgtggatgctaaatggagggaaaaatgagtaacaaaacgaaaatgttatttattatgaattctcttaattttggaggcgcagaaaaagcacttgtcaatttgtttgatactatgaattacgatgtctatgaaattgatttgcttttgctttcagatgaaggaaagttgcttagtatagtaaacaataaggtgaatataatacacccagatctaattacgcgtaacctttatggagaacattgtaactttatatttaaatttcctaagattatatttactggtagccaatatttgattacaaggaacagatcctatgtaaatcaattgaggtggaagaagttttataaaaaaataattccgcagttacaaactaaatacgatgtggctgtttcctttcttcagggagatccgttgtattatttagttgataaggtattcgcaaaaaaaaagattgcttgggtgcataatgactatcgtatgacccagtgcaatagtatatttgatttgaaatattttgaacaagtcaatcaagttgtaacaatttcaaatatttgtctagatatacttaaagaaatttttccatcggtaccatcaatgtttttgcctaacattgttaattccacatcaatcaattcatatgcagaaggacaaccaaatgaatatgatggagttaaatcaaaaaaattacttacgattggaaggttaaaccctcaaaaaggatatgattttcttttagaaattgcagcatatttgaaagaaataaaatatgattttaagtggtacattatcggagagggagaacttaaggaacaactattagcggagtggagagaaaaaaagctagaagattgtgtctattttattggtacaagagaaaatccatatccatatattaagcatgcagatgtagtagtacaaacaagtcgttacgaaggaaaatctatagtgttggatgaggccaaaattctcaataaacttattgtttgtaccaattatgatactgtgaaagatcagttaattgatggaaaagaggggattatctcttcttttgaagttaaagagtttgcggaaagtatcataggattattagcggatgataacaaaatgaatgagattgtcaattacttatcatcgcatgaatatggaaatgagaatatgatcaaattatatgatcagttatttcaggtataaaaataatactggattggagaacaatggaaaaggaattaatatctattattacacctacatataacagagaaaagacactcattcgagtttacgattctttatgtaaacagagttataaatgcattgaatggattgttgtagatgatggctctagagacaaaactaaagaattgatttcgtcattgataaatcagaaaaataagccttttcctatcaaatatgtataccaaaaaaattctgggaaacacgtggcagtaaataaaggcttagaaattgcaggggggggtacgttggaatcttggactccgatgatgccttgtttgatgatgctttagagacattaatggggtactggaatgcaatgacaccccaggagaaaaaagaatttaaatcagttacaggacgcgtggcaaatgcagagacaggagaattgattggccctaaaaataagcttaaactgattgattgctcttctcttgaagccagatttgtgagaaaaatgggatacgaaaagtggggattatcaagaacggaagttatgcgcgaatttcaaagtccaaatatagaaggactccatttttatcctgagaatattacatatgacgcaattggtagaaaatataaagagcgttttgttgaggatgtggttagaaaatattatctaaattcatcggattcaattataaagaataaaaagggccgtagtaaagaaaattattatttatggctacataatattaatgatgtattcgattattttttatacaatcctaaaatctttctcaaatcatttgtcgggctggcaagagatggggttctttcaggaagaagtataccatatatcataaatcagataaataccttgccgaaacgagtcttgtttgttctatttatgcccgtaggaatgcttcttgcttataaaagataataattgaattgatatgagatgagatgagtcaccttggaacagtcaaagccgtaatgaaatagatacatatccacagtgcgtgagcaaatatgtcaaattagaattaaattacccagtagagcatgggagaaaggaaaaatccaatcatttcctaaatgtgattggattatatgagaatttaatgaaaaagaacactatattagttgattttgatgttcctgatgattgggaatataaacgtggcattgaggatgtaacaggagaaaaatgggaactgtggaaatgtatcacacatcggcttcaaagttctaagattaaggttctgttgcgctatattataacattcttgttcgcgtttaaagtgtttttgcacagaaaaaaatataaaagaataattgcatggcaacagttttatgggttggctttagcttttttttgtaagttgtttaatgtgaaggattatccggaaatatatataatgacatttatatataaaaataataaaagtagagtgtttagtaaatttgtgaaatatgcggtagattctagatacataaagaaattgatggtaatgtcggatggcgaaaaacagttttattctaaagaactgaagttagatgagtctttgttctattgcactagagttggcgttaaagatgaaactaattctattaagcaaaatattacggaaaaatactatttagcagtaggtagaagcaatagagattataaatttttgagagatgcgtggaaaaatgaatatggaaagttaataatagtcaatgattcatataaagagccggaaaaagatggtattgtatgtttaaaaaaatgttatggtcgagactatttacaaatggttgctaattgttatgctgaggttatacctttgaatgataaaaatatatcatctggagctttgagctttttgcaagcaatgatgttttctaagccggttattgtaacaaataatatgacagtaagggattatattaaaagtggatataatggggttatcattgagaacacttcagaagaattggaaggtgcaattaaccaattagagaatccgataatatatcaagaaattgcatcaaacgctcgaaaagaatatgaagagaaatatagtgaattaattttgggcaaggatattggtagtatgattgttcatcgataatggttgcgtggagatgttttttgattcaaggatcaatcgtttttaatcgatcatactaggaggaggataagtataatgcacttatatgttagtaaaaaagctatattacagtatttaatgctgtatgtcatgttgattttttgtcaaacacatgtgtatagattatatattagatcaaatttgacgatacatgttggtttagtaatattatttttaataattggtgtagtcaattttaggaaaaaaacaaaacgaccttttttgatgtgtgcttttttgttagcaatggttataggggttcgttttattaatggtggtgtaggaattgatttttgggctgaaatggccgcaaaaatactaattacatatattgctatattgattgatcctgaacagtttttaaccagatttgtaaagattataacgttttttgcggcaattagtattgtgggatggctgcaacagattgctggtttgaatattatgcaaaaaatcggcatggtaaataacgatttttacacaacagtaacatgggataaaggttatgttgaagaaactcagcgtaagatttatgggttgttgttttatgtgacgacagatgtagaaattaaacgtaatatgagtattttcacggagcctggtatatatcaaatggtattgaatgctgccatttttgtagtagcgttttgtaataaactcattgaattaaatcctaaagaaattaaaaaatattttttaattctaacaattgcattaattacaacgcagtcgacatctggatattttggatatgcggtaatagttcttggtattcttttgacacgaagtgcagacacaaggacaattaagagctatatttatattattttagtggttggatttgtagtgctattgggagattattccgtaagaggaaatgatagtttgatttacagggcattgttatcgaaagtgttttctagtcagggagacttttcattttccgcttcgacgggagtttatcgttatgaaatgattgggatggcattgttggctatggcaatgaatccatttggtatgggctatgaagcttgggcaaaattgtatcgtttgaactcattcgctgatgccggtggatatccgtttattattggagcggtaattggtattgtaccactttttgtatcattatggtggatatttagtccgcttaagtatatgaaaaataaatgggtagaaattgtagtatttttatttttatattttaatacagctatggcacaaacaagtgcattttatcctgcaataatttttttgcctgtatttcttgatattatgagacagaacattactgatctggagttggagaaagagtatgcttatgaactataaatacgtaattgctggtgcagataatgatttttatgatattgcatttgatgatgttagaaataaggataaaaacattacttatcttagaacggccatggattttagtaatccggtgataagatttttgagaaatctccattttagtgctcgagctaatacgattattaatttaccaggtaagtttatatggaatagatttacttttgaaaatccttataaaaatacagataaaatatgctttgttgtttttggagcaaactacgctagatatgtagagctaggagttttcgaatcattacgaaagagatatccgggatgcaaaatagtttgttattttcaagatttagcaagtaaatgtggttattcgtatccagaaaaattgaaagaccattttgatttaatcttgtcatttgatcaaaaggattgcgatatgtacggatggatatattatccgttagtatactcaaaagttcatatagaagataataatgatattcctgaaagtgatgtgtattttgtaggtaaggcaaaagatagactatctgaaattatttcgttttttgaaaagtgtgatgctgcaggcttgaaatgtgattttcatattgtcggtgtgccaaaagagaatcaggttctcaaaaataaaatctcttattgtggacaaatgtcatatgaagaaaatttacagagaataagaaaaactcggtgtatgttagaaattatgcaacagggggggcatggatatacattgaggtattgtgaagcaattgccatgggaaaaaaattggctactaataatcccgaaatagaaaaagcacctttttataatgaaaagttcatttctatatttagaaacgttgaagaatttgatcctcaatttgttcttaatggtgatcgagatgtggactataattatcttcctgaattgtctcctttgaagctgattgaatttattgacgctagaatataaaattttgtgaagaactgctatgaaaatcaaccataaatagaaaaagctttccatttcatatcggtgatatagaggatggatttaatagagccccattaggttagctgtttataaatcatttttattggtatagtatatgaatttcatttaaaacatagctataagcagatgaaagtgtgatgatagctttccaattggcatattagtggtaataagatgtgtataaaaatgataaagacacattaataattgtggatagctgtagataaggaaaattaatgtttggaataaaatcaagaatcagaaaatgtaaagatattataaattttaaattgaaaaataagggggtagtagttggaaaaaatattatattaagaaaccctcagtatatttcatgtggtaaaaatgtagttattggagatgaaagtaaattattatgttgggatagttatggagaagaacaatatagtaatttaccagaaatccaaataggcgataattttcatgcgacacgaaattttacaattcaatgcgctcaaaaagtggttattggaagagatgtattggtagcttcgaatgtctttattatagattataatcatggattaaacccattaaccaagtcgtatcttgaaaacccactaatacggggggggggtacttgtagatgatggtgtttggattggaaataatgtgattgttcttcctaatgttcatattggaaaaaaatcaattataggagcaggttctgttgttacaaaggatataccagaatactgtattgcagtgggaaatcctgcaaaagtaataaaaaaatttgatataaaagaaaaaaagtggaaactggtattatgaattggagaataaaatggtaaagaaaaaactacaaaatattcctttgggagtaaaatcagcagtggtatataccatggcgtctgttttttcaagaggattatcaatgattacagttccaattttcacgagaataatgtctacaagtgaaattggaatggttaatctatataattcctggtatttattattgaatgtaattgcaactctatcattaacatcaggtggatttcaggtagcaatgaaagactttgagggggaaagggatcaatatcaatcgtctgttttgacattaacgtcaatgatggccatttttctaggctgtatttattttctcatacctaatagttggaataggattacagggctaccttctgctttgatgattttaatgcttgtagtgtttttctttgcacaggcgcaggatttttggctattgagacaaagatatgaatataaatataaattagctggtgcattgacaatggggtcagctttagcatcaacagtattgtctgttatagttgttttaagcttaaataaagcaaattcagatcaaattgtagtggggcgcttatatgcaactaacattgtatctatagctatttcagcaattttatggattaaattatatgtaaaaggaaaaacgatagtaaatataaagtactggaaatactctttgaaattgagtgtgcctcttattggttatgcttttgcggcacagattttaagtgtttcagatcgaatgatgataagcaaaatggttggaaatgatgcagttggaatatatagtactttatatactgtaagttcaatttcactgttagtttggactgcaattaattcatcgtttataccgtatttatatcaaaatatagagaaaaaaggaaatagaataaaagaattatcattagctttaatgggttcgtatgctattatagctgttatgcttacttttcttgcaccagaaatagttaaaatattagctactaaggaatattatgaagcaatttatattatgccacctattgcagcaggtgtgtttttgacttctgtgtcaaatatgtattctaatttgctcatataccataagaaaactaattatattatgtattcttcgattatcgcagctactgtaaatcttatactcaactatatatgtataaatgcatttggctatatggcagcagcatatactacactgatagcatacatagttttggcgggaacacaagcaatgtttgcgagaaagattcgctttaaagagactggggaaaaatctgtatataatgataatgcggtatttgttatggcgatattaacgataatagtagccttattcggcttggtattgtatcgctatacttggttaagatatataatcatttgtactggaatgattgcaggaataaaaatcgcgttcatgactttgaaaagaattaaaagttaactaggaattaggggagacctgctatgaataaaatagctataaaaaagctaatgtcaccattatataaaataaaatacagacttcattctaatggatgggtttatattggaaatcacactaaaattgtaaatcctaagcatctccatttggaggggggaatcaaattgctccatattgtttaatatgcccacatggagatgcatttattaaattagggcaaggtgtaaatatcggtatgttttcacgacttgcttgtattaacgagatttctttaggaaataatgtacttacaggaccacatatttttatttgcgattataatcatgcatatgaagatataaatagacctatttctttacaaggaaatattggaaacgataataaggttattatagatgatgactgttggattgaaacaaatgttgtaatctgtggcaatgttcatattggaaaacatacggtaattggggcaaatgcttttgtcaataaggacattcctagctattgcgttgcggttggaaatccagcaaaggttgtcaaaaaatataattttgagacaggtgcatgggagaatgtataagtaatgaaaagtattataaatagcgttcagcaggaaaacggcagataattgtctaaaaagaaaaattgtttccatggcataatgataactgacaaatgacgctaggctttgcctagaagtatactatgtcaggctattatagtatgatttgcagtacctacaaattggacaagtgttttggagtccactttcgtaaatagacctcgttggtgactgcaaagaattcaatatgcgttacgacatcgaatctgatcaagatttataatgaatcatactgtttcctgaagactaaattgaaaatggtattaagaaaattattcagtgatgccttgataactttggatggtgggataccattattagtcgtgagtgatatgaactaccatgagaaaatgcatagcactaataacggattttaggaggaatcgatatgaagttctttgtaacaggtgttggtggccaacttggccatgatgtgatgaatgagctgctgaagcgtggccatgaaggtgttggttctgatattcaggaaaactacagcggggtggcagatgactctgcagtaacaaaagcaccttatgtggctctggatattactgataagaatgccgttgaaaaagtaattacagaagtaaatccggatgccgtaatccactgcgcagcatggactgctgttgatatggctgaggatgatgataaagtagcgaaagtccgtgcaatcaatacaggcggtactcagaacattgcggatgtctgcaagaaattggactgtaagatgacctatatcagcacggattatgtgtttgatggtcagggtacagagccctggcagccggactgcaaggattacaagccactgaatgtgtatggtcagacgaagctggaaggtgaactggctgtcagtcaaacgctggagaaatattttatcgttcgtatagcatgggtgtttggtctgaatggtaagaactttattaagaccatgctgaatgtcggcaagacgcacgatactgtccgcgtggttaatgatcagattggcacaccgacctatacatatgatttggctcgactgctcgttgatatgaatgaaaccaagaaatacggctattaccatgcgaccaacgagggcggttatatcagttggtatgatttcacgaaagaaatttatcgtcaggctggttataagacggaagtcctgccggtgaccacggcggagtatggcttgagcaaggcagctcgtccgttcaacagccgtctggataagagcaagctggtggaggctggattcactccgcttccaacatggcaggatgcactgagccgttatttgaaagaaatcgagtagaatgatgagatatactttgatagatcttacaaagcgaaacttaaaagacaaggactagaagtgtctggaggtaaaaatactttttgatttagataataaatgaggagaaaaagcgatgaaaacaacattacttgtcatggctgctggtatcggtagccgcttcgaaacgggaattaagcagttggagccggtggatgcttctaatcatattatcatggattactcgattcatgatgcaatcgaggctggcttcaatcatgtggtatttattatccgtaaggatattgagaaagagttcaaagaggtcatcggtgatcgcattgcctctatttgctcttctcacaatataactgtggactacgctttccaggacattaacgatattccgggaactttaccggaaggccgtacaaaaccgtggggaaccggacaggccgtgcttgctgctaaaaatgtgattgataccccgtttattgtcattaatgctgatgattactatggcaaggaaggctttaaggctgtccatgagtatctggtaaatggcggaaagtcctgtatggctggctttgtgctgaagaatacgctgtctgataacggtggtgtaactcgtggtatctgcaagatggatgagcagtacaatctgactgaggttgttgagacaaagaatattgtgaagaccgcaactggagcagaagcagacggaaaagtgattgatgttgattctctggtatctatgaatatgtggggattaactcctgattttttggacatgctggagaaaggtttcaaagaatttttcgagaaagaagttccgggcaatcctttgaaagctgagtatctgatcccaatcctcatcggtgaactgctggagcagggcaagatgtctgtgaaggttctgaaaacgaacgatacctggtatggtatgacctatcatgaggatgtcgcagttgtaaaggacagcttcaaaaaaatgctagaaaacggcgtgtacaaggctgacttgttcagagatctctaaacaatgatgaaagaaactattgatttactcgggaagattctcacaaacatcctgactgcgctctatgagccgtttggcttttcgcttcttctttcctttttggccatgtttttctatttgtatgcgcatgagccaatacatgctggtaaaggttggaaaaatgctatagtaacgtggtatcagaagttcaaagagagcatgttcttccgaaagttgtttttattgactttcgtgatttcgatgatcttgttcagaacgctgttgaattggaacctgtggatgaatccgttatccaaggtcatgggtggctgggttatctgggagatagaaaatggcgaacagaagctgactaccgagtgcatcgagaatgtgatcatgatggtgccgttttcagcagtagtggcgtggacgttcggagagaagattggaaacagctggaagaaaatactgtggtatagcggaaagatggcatttatcttttctataagcattgagttgctacagcttctactacggctaggaacattccaactatcagatatcttttataatacggtaggtggagtgctcggtggactgatatactacggagttatgaaggcaagaaaacatctgtaaaaaggaatggaattgtgatatactgggagcagaagctccctacgctgctcgaaactttgtacacctctccgtggtgagcagcagtcaacacagtaaaaggtattgtggctaagaatgcgaagtaggagatcctttagtttgttatgattgtttcaaatcattacattgaggaacttaaaagcaaaatttacacgaaagatctatttgatcgtgactaaacaacaattttggagggaaacttggaacgcaaaaagaaaaaaaagaatatttgggtgataattatatctatcttaatttttattgcccttataggagcaggggcttattccttaagaaatttacttattcctactaatcatccgaggacaaacagttcggatcaacctaaaaaaacttcggtctctaacggttatgtagagcaaaaaggtgaagaagctgccgtaggtagtacagcacttgtagatgatactggtataccagaatgggttaaagttccctcaaaggtaaatctagataaatttactgatttatctacgaataatatcactatttatcgaattaacaatccggaagtcttaaaaacagttaccaatcgtacagatcaacggatgaaaatgtcagaagttatagctaagtatcctaatgctttgattatgaatgcttccgcatttgatatgcagacaggacaagtagctggatttcaaattaataatgaaaagttgattcaagactggagtccaggtacaacgactcaatatgcttttgttattaataaagatggttcgtgcaaaatttatgattcaagtacacctgcttcaactattattaaaaacggagggcaacaagcctatgattttggtactgcgattatccgtgatggtaaaattcaaccaagtgatggctcagtagattggaagattcatatttttattgcgaatgataaagataataatctctatgctattttgagtgatacaaatgcaggttatgataatataatgaaatcagtgtcaaatttgaagctccaaaatatgttattgcttgatagtggtggctcaagtcaactatctgtcaatggtaaaacgattgttgctagtcaagatgatcgagccgtaccggattatattgtgatgaaataaaaataaaagaacctcttggttcttttattttagagatttttcaaaaagagttttgactgagtctaattctgtttgagaaactactttagctccattttcatctgttgtatgtagattgagcttgctggtattctttagagccttattgtagctcataacgatagttttagcatcatcgaaacttatattggttttaacagtgtttgaaaaagcatagagaatttctcgatagtaattgaaactttcaagttttttcatatgagccattttttgaatatttccgtagagttccattgagacattttgaatccgagtgattgaagcatccaaatcagtatcgtcaatttgtgtcatataggcttggacttgatcagcagtttgtaaattaacagttccttgtttaaactcataaccttcagcattgaatgcctttggattttgcatggtgattccaccagtggcctgtacaagtgatcccattttattaacatcaatctgaattactttgttaatggacacattcaataggtctttaaccatctggaaaattccatcatctccattcgtattgtaaacttcagtgattgttttttgattaggcattgtcgcaaaaactgggaagttcatgaaagtagtttgatttgtctttacattcgttgaagctaaaacagtagcataagctgtatttttagaattatttttaccagttgcaatgataagtgtggtgaatgttttagacttttttaagtcgatacttgttgttttagggaaattttcatatgatgttgaaaatgttgattcaacatttctataagctgcgtaggctatagaagcaatagcgataattacaaatgcaaaaataattgaaacaacttttagtactgtgtgttttttcttacgataataacgcctctttttttgagtcat

SEQ ID NO: 222 - DNA, 24364 bp, Lactococcus lactis
  DSM 33141 eps gene cluster, complete sequence
atggatgatttattttaccatcgtctaaaggaactagttgaatcaagtggtaaatctgcaaatcaaatagaaagggaattgggttaccctagaaattctttgaataattataagttgggaggagaaccctctgggacaagattaataggactatcagagtattttaatgtgtctccaaaatatctgatgggtataattgatgagcctaatgacagttctgcaattaatctttttaaaactctaactcaagaagagaaaaaagaaatgtttataatttgtcaaaaatggctttttttagaatatcaaatagagttataacaataataaatttagggagtttttcttattaatatgatgaaaaaaggaatttttgtaattactatagtgatatctatagcagtgataattggaggtttttatagttataattctaggataaataatctttcaaaagctgataaaggaaaagaagttgtaaaaaatagcagtgaaaaaaatcagatagaccttacctataaaaagtattataaaaatttaccaaaatcagttcaaaataaaatagatgatatttcatcaaaaaataaagaagttactttaacttgtatttggcaatctgattcagttatttctgaacaatttcaacaaaacttacaaaaatattatggaaataagttttggaacatcaaaaatatcacttacaatggcgaaacaagtgaacaattattggctgaaaaagttgaaaaccaagtattagccactaatcctgatgttgttttatatgaagctccactttttaatgataaccaaaacattgaagcaacagcctcacggactagtaatgagcaacttataacaaatttggctagtacaggagcagaggtgatagttcaaccctctccaccgatttatggtggtgttgtataccccgtacaagaagaacaatttaaacaatctttatctacaaaatatccctatatagactactgggctagttacccagacaaaaattctgatgaaatgaaggggctgttttctgatgatggagtatatagaacattaaatgattcggggaataaggtttggctagattatattactaaatattttacagcaaactaattaagttataaataacaattattaaatattggagaagaaatgcaggaaacacaggaacaaacgattgatttaagagggatttttaaaattattcgcaaaaggttaggtttaatattatttagtgctttaatagtcacaatattagggagcatctacacattttttatagcctccccagtttacacagcctcaactcaacttgtcgttaaactaccaaattcggataattcagcagcctacgctggacaagtgaccgggaatattcagatggcgaacacaattaaccaagttattgttagtccagtcattttagataaagttcaaagtaatttaaatctatctgatgactctttccaaaaacaagttacagcagcaaatcaaacaaattcacaagttattacgcttactgttaaatattctaatccttacattgcacaaaagattgcagacgagactgctaaaatttttagttcagacgcagcaaaactattgaatgttactaacgttaatattctatccaaagcaaaagttcaaacaacacccattagtcctaaacctaaattgtatttagcgatatctgttatagccggactagttttaggtttagccattgctttattgaaggaatcgtttgataacaaaattaataaagaagaagatattgaagctctggggctaacggttcttggtgtaacaacctatgctcaaatgagtgattttaataagaatacaaataaaaatggcacgcaatcgggaactaagtcaagtccgcctagcgaccatgaagtaaatagatcatcaaaaaggaataaaagataggagttcaggatggctaaaaataaaagaagcatagacaataatcgttatattatcaccagtgtcaatccccaatcacctatttccgaacaatatcgtacgattcgtacgaccattgattttaaaatggcggatcaaggaattaaaagttttctagtaacatcttcagaagcagctgcaggtaaatcaaccgtaagtgctaatatagctgttgcttttgcacaacaaggtaaaaaagtacttttaattgatggcgatcttcgtaaaccgactgctaacattacttttaaagtacaaaatagagtaggattaaccaatattttaatgcatcaatcttcgattgaagatgccatacaagggacaagactttctgaaaatcttaaaataattacctctggtccaattccacctaatccatcggaattattagcatctagtgcaatgaagaatttgattgactctgtgtccgatttctatgatgttattttgattgatactacacctctctttgcagttactgatgctcaaattttgagtatttatgcaggaggagtggttcttgttgtacgtgccaatgaaacaaaaaaagagagtttagcaaaaacaaaaaaaatactggaacaacttaatgcaaatatattaggagttgttttgcatgggctagactcttctgactcaccgtcgtattcctactacggagtagagtaattggaatgaattttaatcaaataaaagacagaaatttgtagaagaggagagcaaatgattgatattcattgccatattttaccggggatagatgatggagctaaaacttctgaagatactttgaaaatgctgaaatcagcaattgatgaagggataacaaccatcactgccactcctcatcataatcctcaatttaataatgagtcaccccttattttaaaaaaagttaaggaagttcaaaatatcattgacgagcaccaattaccaattgaagttttgcctggacaagaggttagaatatgtggtgatttattaaaagaattttctgaaggaaagttactgacagcagcgggcacttcaagttatatattgattgaatttccatcaaatcatgtgccagcttatgctaaagaacttttttataatattcaattggagggacttcaacctattttggtccaccctgagcgtaatagtggaatcattgagaaccctgatatattatttgattttattgaacaaggagtactaagtcagataacagcttcaagtatcactggtcattttggtaaaaaaatacagaagttatcatttaaaatgatagaaaaccatcttacgcatcttgttgcatcagatgcgcataatgtgacgtcacgagcatttaagatgaaggaagcatttgaaattattgaagatagttatggttctggtgtatcacgaatgtttcaaaataatgcagagtcagtgatcttaaacgaaagtttttatcaagaaaaaccaacaaagatcaaaacaaagaaatttttaggattattttaaagggattaaatggagtaaataatggaagtttttgaggatgcctcagcacctgaatcggaagaacacaaattagtagtattaaaaaatttttcttatggagagctaattataaaaagagcaattgatatcctaggaggattagcgggttcagttttatttcttattgcggctgcattgctttatgtcccttacaaaatgagctcaaaaaaagatcaagggccaatgttctataaacaaaaacggtatggaaaaaatggtaaaattttttatattttgaaatttagaacaatgattcttaatgctgagcagtatttagagctacatccagaagttaaagccgcctatcatgccaatggcaataaactagaaaatgatccgcgtgtgacgaagattggttcatttattagacaacactcaattgatgaattaccacaatttatcaatgtccttaaaggagtcggcggtatagggcacctctaaaaacgtatgaaaagaggtataatagattaaaaataagctaacgaggtattgaagatgaatttatttggagatagcgactatcttgaaaaattaagtttaaaaggagaccctcttgagcggctagaaaaagtggttgatttcgagtgttttcgcccaactcttaaccggatttttaagtatgatttaaaaaacaaatctcatggtggtagaccgccctatgaccttgttttaatgttgaaaattctaattttacaacgcttatacaatctatctgatgatgcaatggaatatcaaatgattgaccggatttcgtttagaagattccttaagattgatgacaaggtaccagacgcaaagactatctggaactttagaaatcagctatcaaaatctaatagaggaaactcgcttttttctgcctttcaagaaaaacttgaatcacaagggatgatcgctcataaaggacagattgttgatgcaacattcatagaggcgcctaaacaacgtaatccaaaagacgaaaatgaattgattaaagcaaatagggtaccagtgaattggacgaagaacaaaagagcacagaaggatacagctgctcgctggacaattaaaggtaatgagagacactatggctacaaaaatcatattgctatagataccaaatcaaaattcgtaaagaattatcaaacaacgcctgcaaatgtgcatgattctcaagtaatgggagttcttgttgatcccgatgagatcaccttagcagactcagcttatcaaaatcaagcaacacctaaagatgctgaactttttacctgtcttaaaaacacatgttctaaatatcttaaggcagacgataaaatgtttaataaaatcatttcgaaaagacgtgtccgtattgaacatgtatttggctttcttgaaaattcaatgcatggttctagtttacgttctattggatttgatcgagctgttttaaatactgaccttacaaatctgacttataacttattgaggtacgaacaagttaaacgtttaaatctcaaaacatgaaggtaatctgtctaaaataagaataaacattcaagtggcgtttgtaacataaagaaaaacgcagtagactatgcttagttttctgtgtttttttctaatttcattttgaggtgaattaattggtagttattagaggtgccctataatagagccaaccgagaaaaagcttgattttacagggctttcgttggcttagctaggttccttagtatgattcttatgatttttcattaaaggaaaccaatcgcatttccagcgggaatatatataataaagtggtttcctggatgcttatttgacccaatcataaataagtaaatgagaatcataaataataggaggtaatggctgagcctgcggatgtccctcgaaagacgttcacaggttatctgtcgttggagaaaaatataagaaataaatgagaaaaaagagataagaaaatagccctcgattttgtcgggggggggtacagtaagggagatatgaaatgctaggaatatcaaaacgaaagtgtacgatggataccccagtacatattaatgggaatgaaaagaaaaagaaaactgaatatcgaaattcttatatcgcatatctaaatattcaaaatgtgattctcatgtgctgcttacttgtgttcggggtatggctatggacggaattacatatctcaacaaatcttaacatattctggattaatgctcttcttggtgtagcaataatcctatctagttttaaatcactcaaatttgaaggcaatttctacaattgtggggacgattgtagattaacagatagattacaaaaaaatggaaggggaaagaaaaaaatctatgtatagaaaagattctgaaggatggttaaagcacgcagactttatagtcttagatatgatctgtttgcaattagcgtatgttctggcatatgcaattagcggatatggatttaatccatatgaaacaattatttatcgcaatatggcagttttccttgaattggcagatctggttatgatttttgcatatggcaccatgaaaagcgtgttaaagagaggatactatcgtgattttgctgttacgttaaatcatgcgattatggtaggtgccttagcggttttatatttattcctgcttcaggaagggcaggacttttcaagattaacattgatgctgaccataataatttatttagtaatgacgtatattgtcagagaactttggaaaaaacttctgcgaaaacagatgaaggatggcggagaacgtaaactactgattgtaacatcagaagatgtggctgaacaagtagtgttaagtatgcaggaaaataattatgccagattttcattggctggtgtagctgtaattgatgcggactggactggaagagaaattcatggagttccggtagttgccaacgaagagactgcagcaatgtatgtatgtcaggaatggattgacgaagttctggttgttgtttcagaagttcttccgtatccggcagagttaattgagcagttatcagagacaggagtaaccattcatcttaatcttgcaaagattacaagtgtgccaggaaaaaaacaatttgtggaaaaagttggtaattacacagttcttacgacaagtattaattatgcatcaaccagacagttaatgttaaaacgattgatggatattgcgggtggattagttggatgtatttttaccggaatcatttgtatttttgtcggaccggcaatttatattgcatcaccgggaccaattttctttgctcaggaacgagtaggaaagaatggaaagaaatttaaaatgtacaagttccgcagtatgtatatggatgcagaagagcgtaaggcagagcttatgaaagataacaaacttggagatggaaagatgtttaaactggactttgatcctcgtgttatcggaaataagatacttccagatgggacacataagacaggaatcagtgattttatcagacgaacaagtttagatgaatttccgcaattctttaacgtattacgaggcgatatgtcgattataggtactcgcccacccttgatttcagaaacgaatctgtatgagcttcaccatcgtgcaaggctggcaattaagccgggaatcactggcatgtggcaggtaagtggacgaagtgatattactgattttgaagaagtagttcgtcttgataaagagtatatcacaaactggaacattgggctagatataaaaatattatttaaaacgatattggtagtctttaagaaagatggatcaatgtaaagcctacaagcagcttattttatagagagaataagctgcaaaggataaatataaagattgcacttaaaagaggaagttatgaataaaaggaaaaataataattctccacttaaaattgcagttcttggacataagacaattccgagtcgccaaggtggaattgaaattgtagttgaagaattaacagttcgtatggcaaaactgggacataaaataacagtatataaccgtagcggacatcatgtaagtggtaaagaatttgatggaaagaagctaaaagaatataaaggaatccgaatgaaatatgtaccgacaatagataaaaaaggattagcagcgatgagtgcctcttttttcgcagcggtggtagcggcgtttggaaaatatgatgtggtacattttcatgcagaagggccgtgtgcaatgttatggttgccaaaattattcggaaagcgatgtatagctacggtgcatggattagatcatcagagagcaaaatggggtaaattagccagtacatatattatgttgggagaaaaatgtgcggttagatttgctgacgaaattattgtgttaagtgaaggggttcagaaatatttccttgatacatatgggagagaaacccgttttatacctaatggtgtaaacagaccaattatccgaaatgctgaaattattaagaataaatttggtttagaaaaggatagctacatcctctttttgggtagattagttccagaaaaagggcttagatatttgatagaagcctttagacaggtagatactgagaaaaaaatggttattgctggtggaagttcagatacagatgaatttacaaaagaattaaaagaactggcaaaagatgattcaagaattatttttactggatttgttcagggaaaagagttagatgaactttatagtaatgcttatgtatatactttgccgagtgatctggaaggaatgcctcttagtttattagaggcaatgagttacggaaattgctgcttggtgtctgacatagatgaatgtgcatctgttgtagaagataaagcatttatttttaagaaaagtgatgtggcagatttgcaaagcaaattgcagaaagcttgtgatgataaagaacaagtacaaaaatataaagatgaagctgcagattatatttgccaaaaatataattgggatgatgttgtagaaaaaacactagaattgtatcaataattaaggaggatgacatgaaagggattattttagcaggtggatcagggacaagattatatccagattggactaatgtcaaatatttagacacaaaatgagctatattttcttaaaataattttcttctttctgatttggagttaaaccattgttggcggaatgaggattataattgttataaaattgttcgatgtattcaaagcaagagagttgaacttcttgaatggagtgataagttctgcgattaatttctcgttgtttaagatacttgaaaaagacctcagtgacggcattatcataaggatatccaggcttggagtaagaagcaagcaattgatgctcatctaataactttctaaaggaagctgatttaaattggcttccttgatccgaatgaaaaataattggttccttaggtttcctcttatttatagctatttctaaggtgtcacaggcgagcttggcatcaatcctatcacttactttccacgcaatacatttccttgagtagaggtcaagaatagcacagagataaacatgtcgcttaggtcctatagagatataagtgaaatctgttgtccaaacttgatttggggagttcgggttaaattcttgtttaagcagattatcagaagaaaatacaggagatttatttgatttaaaacgaggtttgatggttgacattttagggagtgtcatagacttgagaagtcttaagatacggccttcagaaatattaacgccataatcacgcagaagaatgattttaaaggctctcgttccaattcttttcttggctttcatataaatctcaaggaggtgttttctcaagcgttgattttctacttcacgcttcgaaggcctcttgtttatgaagttatagtaggtggaacgattgacatgtaaaacacgacagagcataactgtcgtgtgttcaaatcggagtctatagatggctttcaatcttacttggagttttgcatgaatatggcactcgctttttttaagatcagattttcttcctctagttgggcattccttttttgtaattcttgaatctgtttagcagtcaacaccgtattatcttcaagacgcacttgagagtactgcttaatccattttgcaagtgcagaagaagataccccataatctttacagagttcagtttgtgttttaccagtttgatagagattaacgagcgattgtttgaaatcctcgtcgtaacgtttaaaacctgacataaaagtcctttcatttttgtgtcttaatagatagattataacacacaattttctgtccacttttatagtatagctccaatggggagattcaattaaatgttggacatatagaaaatgtgttgttttatacagttacatctattgtgggttggattttaatagcaacagtatcacaaatttttgtaataggagttagtttaccattgataattgagtggttatatacaagggctaaagctacggtaataaagcagacttgatagtgcaaatagaaggagaaaaaaatggaggttattaataaggaacaccctcttattagtgttattgttcctatatataaagtcgaaaaatatctgggtaaatgtattgagagtattattgcccaggaatattcaaatatcgaaattattttagtggatgatggatctccagataattgtggtaaaatatgtgatgattttgctactaaagatgctcggattaaagttatccataaagaaaatggaggactttcttcagcaagaaatgctggaattgatattgcaacaggtgagtatttgggctttgtagatagtgacgattcgattgagccgtttatgtataaaaaattgatttcttcaattatagaaaacaaaaccaaattagcagtatgtgcggtaaattatgtatttgaaaatggtaagattcttacgaaatctaatttaggtgagaattgtacatttgatttttatcaagcaatgatagaaatgaattctcatagaatttttgatatgggtgcatggagcaagttatatcatagagatttattttttgatttgcgctttccggaagggaaattaagtgaagattattatattatgtataaaatctttgaccgagcgcaaaaaattagttatgtctcaacaccgtgttataattatttacaacgacagaatagcattacacataatgttagaattaatcacgatcatgaatatgctgcaaaggaacaaatggaatatttagaaaagaaatatccagaattaaaggtcttgggacatacagcttatgcttcagcggcattaactgtatatgactcatatattaaaaatgccgttagctgtcctcaaaaggatataaagcattttaaaagtgtagttcgggaaaataggcagtatattaagaatgcagattttttgtcaaaaagcaaaaaagttcaatttcaattattttcaattagtacagctatgtacaatattgtatttaaggtgtatagaaaaattaagagggtttagtatggataaattagtgagcgttattattccagtgtacaatacaggaaatattataaaaaagtgtattaagagtatattgaatagtgattatagtaatatagaaataataattattgatgatggatccgataaagaaactgtagatatatgtaacaacttagaaaaagaagaaaaaattcatgtgattcatcaagaaaatgctggtgtaagtagcgctcgcaataaaggaatatatcacgctcaaggggagtttattacttttgtagatgcagatgacacaatagattcaaacctaattagtgttcttgtaaatagttgcattgaaaaaaatgccgatatggcaatttgcggttatagagaatggtatgatgataagcattgtacagaattccggtgcacagattcaattacgatattaaaagaaaaggaaattttaaaagactttttttctacaaataatattgcatggaatgtgtggggaaaaatatataagaaaagtttggttggcgatacaagattcatagtaggtaaaaggactggcgaagacatgtattttgtatatgaaatcttaaaaaaagctcatacattggtaatgaataataaggcattgtacaattatgaaaaacaagataattctgcaatggcagattcaaattgtatgaaattttttgatacttatgaattagttaataaagtatttgaagatgaagcattagataacgagctgaaaaatgcgcaattaaatttttatataaaaagtgagttgtggttttttcgtttcataaatgcaaaagataaggataatgagaataaaagtgaaataaagaaagcaagaaaaaaattcttggacaatattaagaaaaaagaagcaagatgttctggaagaacaaaaatagaattaattttattgcgatatttttatcctgtttttagagtgatctctcttatatggggggcaaaaaaggggatttagaacagaatcatgaggacactttgacatcatataaacaaatgaaagagatgttaaaaagagaaaaaaaatattatccaaatacatggtttgacaatataagttgtaatcaacgagtatacaactggcgattcatgaaattattacgcagatgcgagctttatagatataaggcggatcattctaagaatcctgtatggaaaggattatatttgattaatcgtacgaaaaagaaccggttaggtgtttggattggagtagagataccagagaatgtgttttcagaaggattaattattcatcatagtggaaatattgtagttaatggaagtagcaaagtagggaaaaattgtcaacttcatggagataattgtataggaaattcaggaaaagaaaatgaattaaaaaaatgcccacagattggagataatgtagaaataggagttggagcgaaagtattgggtggcattactattgcaaataatgtaaaaattggagccaatgctgtagttacaaaatcattttatgaagagggcattactcttgttggaatacctgcacataagctagaaaggtaaatacaaatgaaaattttattgcttataaattggaaaataaaatattgtgaccatataccagaggatttgcaaccttcagattatgattgtcctcaggaggtatattggttttttaaatactttaaagataaaccagaggtagatgttgttgatattagtgcaccaaaatttattgaaaagatagaaaataaagttcggtttcatttttttcaaacttttaaaatattatttaaattgaataaatatgatttgatttttgtttgtggatctaatagtgcaatgctgttgtgtgcattaaaaagagtgtttcacataaaaacacctccaatattggatgttgatataagttcatttcatcaagcatatacttcaggattgattcatagattatcacagttttctagtagggcttttgattatatggtatatcatactagttcacaatatgattattatatggaatattttccatggttaaaagataagtgcaaatttgttccatttggtgttgattataattattggaaattaaaaacgtatgaagatatacctgaaaaggatcaatatattgtttgtgtaggatatagaaaaagagattggaatacattactaaaagcgtttgataaaatagatattccagaaaaattatatcttattggaaatccagatattaaatgtgataatccaaaagtaaaagtgcttccttttatcccagttgcagcagatggctttgggagttccggtattagcagcagatgtttcagctatacgtgattatgtgaattgtagtgaaggggttctgccttatatagcatataatgtagaagatttagcttctaaattagagaaaatgtcaaaaaaatcaaaagaagatttagatataatgggatataaaaataaattagcggtacagactgttttgagtgaaaaagaaatggcaattcagtttgaaaaaatatgcaatcagttattctaaataattaatatgaatattaaaagggtgcgttaattataaaatatgctaattataagtcgggataaaaagaggtagatatgataataaagaagaaagataaatattatattatgctatttttattatttgttgttgatttaaattttttaaatttaatagatactgcaacatttaatatcggaggaatttattatacagacattgtatttctattaaatatttctgtatttttatatcagattataaaggataaatttcaaattgcaaaaaatataagtattatctatgtattgtgtgtaattatattaatggtattgtcagcttgtgcaggtcacataacatataatcaatcaatagtggctggaatagttgcacagcgagaatgggtgtcatggatgttattgatttatccattatctaggtggattcaattacaaaaactttctgttgaaggaataaaaaaatgtataattaatttatgcaatatatatgcgtttatttgtataatacaatatttattatatgatgtagttcagtttacatatactatggttaacaatagatatggaagtgttagattatatttttatacgatttttttctgttttgctataggtatagttattgatgacttgattagtggatcaaaacgtagtttgaagaattctacaatgcaatggataaaattgctcgcttatttatttataattgtatttattacaaagggaagaatgcaaacaatttctttattatgtgctattatagtttgctcattaattagaagagatatgcggatagaaaaaaaaataatactctgtttattaatagttgtgctgacatatgtttttatgaactctacaatgggacaggatatattgcatgccattatgggtacaagtgaaaatgatactttatctgttagagattcaggaagggtatattatttaggattatatacacagtcatggaaaagaatactttttggatgtggatttgcaaattctaataatagttatgctataacgatacttaatcctttgtggcaggaatatggaagtgcgagatactatttggaagacgtaggaattttatcaccattaataaaatatggattggtaggaatagtattttggattggggttgtaattaaaaatatatcactttcatataaaatttataataaatctggagaaatggtatatttacagtttttatttatggatttaattgcttgtgcgacactggtacctacaatgtttaatacaacaatcctttttccgcttattacaatattaatattatttagagcaaaggaattgcagataataagataagtaaggagatgaaaatatatgaagtgtgtaatgagcatactaaactataatgacagcaggcgagccttagaattagcagaacgatgtgtggaatttgattcaatagaaagaataattattgttgacaataaaagtacggatgattctgtaacatttctaacagagagagtaggatcaaatatagaattagtagttgcatctgaaaataggggttttgctgctggaaataatataggagcaaaatatgcacaagaaaaatataatcctgaatatatactatttgcaaatacagatacgattttctcagaaacggaagtaaatgcatgtttgagtaaattgaaagcaaaagcagatttgggattgatatcgatgaggataaaagatataaagggaaatgaagaaaaatcagcatggcattttaagtctttcttagactatacattatttaatatttggatatatagacatattacatacaaaaaaggcgtgtataaaagtttttccaatgattttcaatatgttgatattgttagaggaagttttatgttatttaaaatgaaagcacttatagaagctaacttttttgatgaaaatacgttcttatattatgaagaggaaattattgcatatcgtttacgtaaacatggatataaagttggattattgacaaattatttctatatacacaatcatattgcaagtggtacaggaaatatatggtttataaaaaaacacttagatgcttcattgagatgggttttgattaattactataatattggaaatgtaaaaataagaatatttgattttgcaactaaaatttgtagttgtgagacttttttaatagaaaaattgaaacggagaggaaaatgattaagttaggtaagaattctaaagtatatatagttagtccatatcacaatacgggaggtccaaaaagtttacatcagttggctaataacttgatagaaaaaggtattgatgtatacatagtttattactggaatgggatatttacaggggagaaagaaatattattttctttttgtaaagcaaaacttgctgattgtatttgcgatatggaagaaaatattttaatagtttctgaatctcagtctgaagttttaaatcattataataaaataacaaaatgcatttggtggttgtctttagatttctatttgactagtagtttaaagggaggtgttcaaaaagcaattcaggaaaaaggattaccaagttttatgcagcctataatgtttttaaaatttattatgaatgatcctaaatgtttgaagaacttaaaaaatttggatgataaaaaactacaaaatatttatcatatgtataattgtgaatatgaaaaagaatatttaattaaacatgatgtgccagaaagtaaaatgtcatacttatgtggacctttagaaaaacagtattacaaaattgattatgagactataaggaaagaaaaacaaaatatggttgtgtacaatccagctaaaatggatatggattttttggaaaaagttaaagatgagttatactttttaaataagaatattaagtttgtggccattgaaaagatgagtagggaacaggtttatcagattttaaaaagggcaaaagtatatgtggattttggctttttccctggtccagaaagaatgccaagagaggcagttgctttatactgtaacattataacatcaacaaaaggaagtgctgagaatgacattgatgtagcgattccaagaaaatttaaatttaatattaaggaaagagaatctgttcaaaaagtagttgaaatgatagagaaaatgattactagttatgatgattatgttgaatatggacagaattatcgagaaaaggtatggaatcagattcaagatttttcaaacacaatttctaatatttttgaggtggataatgaaactcgatagaacaaacaatgcctttagaaatatgaaatttggtatggttaacaaaattgtaactttatttttgccatttatcataagaactgtattaattaaaacaataggtatggaatatgcaggactaaattcattattttcgtcaattttgcaggtgcttaatttgtcggaattgggatttagtagtgcggtagtatatagtatgtatcgcacgattgcagaaaatgatgatcgacaagttggtgcgctactattattttataaaaaagtatatcggattattggtttagtagttttatcagttggattgattataatgccatttttaccgaaattagtagaaggtggttatccaccagatataaatgtttatattttgtatctgatttatctattagatacggttgtgagttattttttatttgcttataaaagtgccatattaaatgctcatcaaagagtagatattgtaagtaatattttaacaattactcaaggtgcaatgaatttggtacagattataatgctaatagcattcaaaaattattactgctatattatatggatgcctttatttacaatcttaaataatattatgacagcctactgtgtaaataagctatttccacaatatcattgtgaaggaaagatttctagagatcaattgtctgatatgaaatataagataagtggtcttatggtgaataaattgtgtttaacaacaagaaatactttagatagtgtatttatatctgcatttatgggacttacagtcagtgctatttacggaaactattattatatattgaatgccgttataggcttgatttcaattgtttcaagtgcgatgcttgccggggttggaaatagtatcgaaacagaaagtgtagaaaaaaattataatgatttgaaaaaattcaattttttatatatgtggcttagcggatggtgtgctatctgcatgttatgtttgacacaaccgtttatgacaatttggatgggaaaagacaatctattcccatttggtgttgttgttcttatttgcatatatttttatgtgctaaaaatgggagatatgcgaggcttatattcagatgcagctggattgtggtggcagaatagatatagagcgataagtgaatctatattaaaccttgtattaaattatgttttagtgcaggtatggggaatttatggaattattattgctacattaatatcattattttttattaattttttgggtggaagtggaattgtttttaaacattactttaaaaatggtaaatttatagaatttttgaaatatcattttttctatatgcttataaccgtaataaatgcttccatatgtgtgtttctaacaaattttgttaaatatgaaggaattattggattggggcttagagcaataatatgtgtaattatccctaatgtaatatatgcattggtatatttgaatatatcagaattaaggcaacagtcaaaatgggtattaagtaagttaaaggtaaggagatgattttgatgaaagttggttttatatcaaactctgatgtttatgataaacgagcgtggagtgggacaataaattttctttatgaaacattaaataaagaatatgatatgtatccgattgtgatagaacataaaataattcaaaaaatgtcacgtataattacaaagggaaaacgtaagtataccttattagatagctttttttataaattagatattaacagaaaaataaaaaaagctcaaaaaaaaggcataaaagtgttttttgctccggcagcttcaacaatattaggggttgcaaagattcctatagattgcaaagtagtttatttgagcgatgcaacatatcattgtatgttaaattattattactttaatgaaagcaaaggagatataaaaaattataatagagtagagcagaagtcattgtgtagagcagacaaagtcatattttcaagtgaatgggctaaaaacgatgcaataatatattatggagtggattcaaataagatacatgtcttaccatttggagctaatttagaagataaatatagcggacatgatatgggagatatagtgaaaatcctatttgttggagtagagtgggaaagaaaaggggcagaattggctattgaatgcgtaaagaatttgaatagaagaaactataaaaagcggtttgaattgacgattatcggattagaaaaaccagaaaaatatctggctgatgacagtattcattttgtagggagattaaataaaaataatcgggatgaattaaattgcatgattaaatattatcaacagagtgatatttttcttttacctactaaagccgaatgttctgctattgtgtttagtgaggccgctatgtatggattgccagtgtttactcataatacgggaggtgttatgacttatgtagaagatggcaaaacaggcagaggattaaagttaggatcaaaagcagaagacttcgctgatgcaattctgaagatgttaaatgaagacaaatataaagaatggtcaataaacgcaagaaaaaaatatgagaaagaattgaattggaactgttgggttgagaagtgtaaagagttaattgaaaattaagatagtatatttggtaaagagaagaggaataaatatgagtcaagagtataaaatagctgttgctggaactggatatgttggattatcaatcgctacacttttatcacaaaatcatcgggtggttgctgtagacattgtaaaagagaaggttgatttgatcaataaaagaaagagtccaattcaagatgaatatattgaaaaatatttgtcagagaaaaagttaaatttagaagctacattagatgcagaatatgcctacaaggatgcagattttgttgtaattgcagcacctacaaattatgatagcaaaacacaatattttgatacttcagcagttgaagcagttataaacatggtaactaaactaaattctaatgcggtaatggttattaaatctacaattccagttggatatacaagagaaattcgtaaaaaaacagggaataataatataatgtttagtccagagtttcttagagaaagtaaggcattatatgataatttgtatccatcgcgtattattgtgggaactgatttacacgatgagaaattaattgaagctgcccatatctttgcagaattattgaaagaaggggctattaaggaaaatattgacacactttttatgggatttacggaagcagaagcagttaaattgtttgcaaatacatatttagctttgcgagtagcatattttaatgaattggatacatatgcagaaagtaaaaatttgaatacaaaacaaattatagaaggtgtttgcttagatccacgtattggtacacattataataatccatctttcggatatggtggatactgtttacctaaagatacaaaacagttattggctaattatgccgatgttccagaaaatctaattgaagcgattgtggaaagcaatcatacacgtaaagattttattgctagtcaagttttaaaaattgcaggatattacaattatgaagatgatatagagtatgataaaaatcaagaaaaaaaagttgtaataggtgtttatagattaacaatgaaatcaaattctgataattttcgccagtctagcatacaaggtataatgaagcgaattaaagcaaaaggtgcagaagttgttatttttgagccaacattagaaaatggaagtactttctttggctcaaaaattgtaaataatttaaaacaatttaaagaacaaagtcaagcgattatagctaatagatatgattcttgtctggacgatgtaaaagaaaaagtatataccagagatttgtttagaagagattaaattttgcaaatggtaaagggggaaatgatatttggctaagcagttatttaaaaaaacaaaattattaatggtgcgtttgctttttacaagatacagagctggttttttaaaaaaaagtaatatttttcactcatttggagatggtgttttgtggcagccatatacaattccaagtgagccttatttaatgtcgatagggaataatgttaaaattacagctggagtcaggtttattacacttgactccagccgtttttggaatggctggttatccagtacatgacgactgtttatattatatggataaaattattattggagataatgtaatgattggtgcagacagtatagtaatgcctggtgttaaaataggaaataatgttattatagctgctggaagtgttgtaacaaaggaaattcctgatggagtagtagcgggggggggccctgctaaggtaataggaggatttgatgaattagctaaaaagcgatatgaacaatgtaatcatagaccatttctagccgctcaagagggtctccttttaaacttaatttttcaagatagtcgctatctccaaataaattcatcttcaatacctcgttagcttatttttaatctattatacctcttttcatacgtttttagaggtgcccttaaacttatatctttatttatactgacgttaagtcaagtttttagagtaacaaacgtagaattttaatctatttattttaagcacttaccttttcaaattgattaggtgtaagataccctaaactttgatgaattcgtcttgataaaacgtttcaatgtaccaaaaaatactatgataggctgcttcaaattttttgcagtagttcctcagtcattcgcttacccaaattccaagcaatgattttttagcataacaatttataatagttgagagataacaccaccctccgaagagtggtcttgtaaggaatatcggttgaccaaaccttatttttttctgtcgggtaagtatgtatgatattctttcggttaacaggatcatatatgaatatcctggtttaaatttttttatgaccacagaatatagttgaagttgcttcattaacttttgtaccagttttaaactgtttttttccatgtttaagcaagaggtgagaatcttaggcactctatagatgacttgttcttccttaactttggccggtgtctttttaattacatttcatctacttttgagacatagatttcattaaacttggagtagaggtcatactctttagaaagctgagtgatgaatcgttctgagtggtaggactcgaccagggtttctttaaattcttttgaatatcgtttttgcatgactttttactttgtctaaattatacaattcccagtctaagatgtaagaataatatcagactacgcaatattttttatattttgtatataatttagtgatcactaggatatcactaaattactctaacttcattatattacctagaccaaatgtgttatagcgaaataagtaaaaattatagttattacttttgatattattccagaagaagtgaattaaatttagttcagtagtagatagaaaattagagtttttttggcaaattgagatttgaatttgcttgcaatgagagctgcagttattgcgcttaagcaaatcggttgttgtaacagcaactaattatgatgatgcaaggacatattttaacatacgttttgtacgtgatttacatacattcgaaaagtttagatttgatcgtgactaaacaacaattttggaggaaaaattggaacgaaaaaaaaagaaaaaaaagaatatttgggttataattatacctatcttaatttttattacccttataggagcaggggcttatgccttaagaaattcacttattcctactgatcatacgaaaacaaatagttcggatcaaccgaccaaaacttcggcctctaacggttatgtagagcaaaaaggggaagaagctgctgtgggtagtatagcacttgtagatgatgctggtgtaccagaatgggttaaagttccctcaagggtaaatctagataaatttactgatttatccacgaataatatcactatttatcgaattaacaatccggaagtcttaaaaacagttaccaatcgtacagatcaacggatgaaaatgtcagaagttatagctaagtatcctaatgctttgattatgaatgcttccgcatttgatatgcagacaggacaagtagctggatttcaaattaataatggaaagttgattcaagactggagcccaggtacaacgactcaatatgcttttgttattaacaaagatggttcgtgcaaaatttatgattcaagtacacctgcttcaactattattaaaaacggaggacaacaagcctatgattttggtactgcaattatccgtgatggtaaaattcaaccaagtgatggctcagtagattggaagatccatatttttattgcgaatgataaagataataatctctatgctatcttgagtgatacaaatgcaggctatgataatataatgaaatcagtgtcaaatttgaagctccaaaatatgttattacttgatagtggtggctcaagtcaactatctgtcaatggtaaaacgattgttgctagtcaagatgatcgagccgtaccggattatattgtaatgaaataaaaaaaagaacctcttggttcttttattttagagatttttcaaaaagggttttgactgagtctaattctgtttgagaaacgaccttagctccattttcatctgttgtatgtagattgagcttgctggtattctttagagccttattgtagctcaaaacgatcgttttagcatcattgaaacttatattggttttaacagtgtttgaaaaagcatagagaatttctcgatagtaattgaaactttcaagttttttcatatgagcaattttttgaatatttccgtagagttccattgagacattttgaattcgagtgattgaagcatccaaatcagtatcgtcaatttgtgtcatataggcttggacttgatcagcagtttgtaaattaacagttccttgtttaaactcataaccttcagcattgaatgcctttggattttgcatggtgattccaccagtggcctgtacaagtgatcccattttattaacatcaatctgaattactttgttaatggacacattcaataggtctttaactatctggaaaattccatcatctccattcgtattgtaaacttcagtgattgttttttgattaggcattgtcgcaaaaactgggaaattcatgaaagtagtttgatttgtctttacattcgttgaagctaaaacagtagcataagctgtatttttagaattatttttaccagttgcaatgataagtgtggtgaatgttttagacttttttaagtcgatacttgttgttttagggaaattttcatatgatgttgaaaatgttgattcaacatttctataagcggcgtaggctatagaagcaacagcaataattactaatacaaaaataattgaaataacttttagtactgtgtgttttttcttacgataatgacgcctctttttttgattcatggtatctccatatatatacat

SEQ ID NO: 223 - DNA, 20584 bp, Lactococcus lactis
  DSM 33137 eps gene cluster, complete sequence
atgaatgatttattttaccatcgtctaaaggaactagttgaagcaagtggtaaatctgcaaatcaaatagaaagggaattgggttaccctagaaattctttgaataattataagttgggaggagaaccctctgggacaagattaataggactatcagagtattttaatgtgtctccaaaatatctgatgggtataattgatgagcctaatgacagttctgcaattaatctttttaaaactctaactcaagaagagaaaaaagaaatgtttataatttgtcaaaaatggctttttttagaatatcaaatagagttataacaataataaatttagggagtttttcttattgatatgatgaaaaaaggaatttttgtaattactatagtgatatctatagcatttataattggaggtttttatagttataattctaggataagtaatctttcaaaagctgataaaggaaaagaagttgtaaaaaatagcagtgaaaaaaatcagatagaccttacctataaaaagtattataaaaatttaccaaaatcagttcaaaataaaatagatgatatttcatccaaaaataaagaagttactttaacttgtatttggcaatctgattcagttatttctgaacaatttcaacaaaacttacaaaaatattatggaaataagttttggaacatcaaaaatatcacttacaatggcgaaactagtgaacaattattggctgaaaaagttgaaaaccaagtattagccactaatcctgatgttgttttatatgaagctccactttttaatgataaccaaaacattgaagcaacagcctcactgactagtaatgagcaacttataacaaatttggctagtgcaggagcggaggtaatagttcaaccctctccaccgatctatggtggtgttgtgtaccccgtacaagaagaacaatttaaacaatctttatctacaaagtatccctatatagactactgggctagttacccagacaaaaattctgatgaaatgaagggactgttttctgatgatggagtatatagaacattaaatgcttcggggaataaggtttggctagattatattactaaatattttacagcaaactaattaagttataaataacaattattaaatattggagaagaaatgcaggaaacacaggaacaaacgattgatttaagagggatttttaaaattattcgcaaaaggttaggtttaatattatttagtgctttaatagtcacaatattagggagcatctacacattttttatagcctccccagtttacacagcctcaactcaacttgtcgttaaactaccaaattcggataattcagcagcctacgctggacaagtgaccgggaatattcaaatggcgaacacaattaaccaagttattgttagtccagtcattttagataaagttcaaagtaatttaaatctatctgatgattctttccaaaaacaagttacagcagcaaatcaaacaaattcacaagttattacgcttactgttaaatattctaatccttacattgcacaaaagattgcagacgagactgctaaaatatttagttcagacgcagcgaaactattgaatgttactaacgttaatattctatccaaagcaaaagctcaaacaacacccattagtcctaaacctaaattgtatttagcaatatctgttatagccggattagttttaggtttagccattgctttattgaaggaattgtttgataacaaaattaataaagaagaagatattgaagctctgggactcacggttcttggtgtaacaacctatgctcaaatgagtgattttaataagaatacgaataaaaatggcacgcaatcgggaactaagtcaagtccgcctagcgaccatgaagtaaatagatcatcaaaaaggaataaaagataggagttcaggatggctaaaaataaaagaagcatagacaacaatcgttatattattaccagtgtcaatcctcaatcacctatttccgaacaatatcgtacgattcgtacgaccattgattttaaaatggcggatcaagggattaaaagttttctagtaacatcttcagaagcagctgcaggtaaatcatacgagagtgctaatctagctgttgcttttgcacaacaaggtaaaaaagtacttttaattgatggcgatcttcgtaaaccgactgttaacattacttttaaagtacaaaatagagtaggattaaccaatattttaatgcatcaatcttcgattgaagatgccatacaagggacaagactttctgaaaatcttacaataattacctctggtccaattccacctaatccatcggaattattagcatctagtgcaatgaagaatttgattgactctgtgtccgattcctttgatgttgttttgattgatgctccacctctctatgcagttactgatgctcaaattttgagtgtttatgtaggaggagtggttcttgttgtacgtgcctatgaaacaaaaaaagagagtttagcaaaagcaaaaaaaatactggaacaagttaatgcaaatatattaggagttgttttgcatggggtagactcttctgagtcaccgtcgtattactactacggagtagagtaattggaataaattttaatcaaataaaagtcagaaatttgtagaagaggggagcaaatgattgatattcattgccatattttaccggggatagatgatggagctaaaacttctggagatactctgacaatgctgaaatcagcaattgatgaagggataacaactatcactgcaactcctcatcataatcctcaatttaataatgaatcaccgcttattttgaaaaaagttaaggaagttcaaaatatcattgacgaacatcaattaccaattgaagttttacccggacaagaggtgagaatatatggtgatttattaaaagaattttctgaagggaagttactgacagcagcgggcacttcaagttatatattgattgaatttccatcaaatcatgtgccagcttatgctaaagaacttttttataatattcaattggagggacttcaacctattttggtccaccctgagcgtaatagtggaatcattgagaacccggatatattatttgattttattgaacaaggagtactaagtcagataacagcttcgagtgtcactggtcattttggtaaaaaaatacaaaagctgtcatttaaaatgatagaaaaccatctgacgcattttgttgcatcagatgcgcataatgtgacgtcacgtgcatttaagatgaaggaagcatttgaaatgattgaagatagttatggttctggtgtatcacgaatgtttcaaaataatgcagagtcagtgattttaaacgaaagtttttatcaagaaaaaccaacaaagatcaaaacaaagaaatttttaggattattttaaaaggattaaagggagtaaataatggaagtttttgagggtgaatcatcacctgaatcggaagaacacaaattagtagtattaaaaaaattttcttatggagagctgattataaaaagagcaattgatatcctaggaggattagcgggttcagttttatttcttatcgcggctgcattgctttatgtcccttacaaaatgagctcggaaaaagatcaagggccaatgttctataaacaaaaacggtatggaaaaaacggtaaaattttttatattttgaaatttagaacaatgataattaatgctgatcagtatttagagctacatccagaagttaaagctgcctatcacgccaatggcaataaactagaaagtgatccccgtgtaacgaagattggttcatttattagacaacactcaattgatgaattaccacaatttatcaatgtccttaaaggggatatggcattagttggtccaagaccaattttactttttgaagcgaaagaatatggggagcgcctcccttatttactgatatgtaaacctgggattactggttattggacaacacatggtagaagcaaagttctttttcctcaacgagcagatttagaactctattatctccaatatcacagcaccaagaatgacatcaagcttcttatgcttacaattgcacaaagtattcacggatcggacgcttactaaaaaatgaaggaaaaacatatttacattattggttcaaaaggaattccagcaaagtatggtggttttgagacttttgtagaagaactaacagcacatcaaagtaataaaaaccttaagtatcatgttgcttgtttatcaaatgacatacaatcaaattttattcataatggtgccgactgttttaatattccaaagaaaaatattggaccagcaaatgccatttattatgatttggcagctttaaagtactcacttaaagaaattgaagaaaaaaattataagggtgcaattatttatattttagcttgccgcattggtccgtttattggttactataaaaagcaaatgaaaaaattaggaattactttgatggtaaatcctgatggacatgagtggttgcgtgcaaaatggagtgtacctgtaaaaaaatattggaaaatttcggaacaatacatggttaaaaatgctgacttattgatctgtgatagtaagaatattgagacctatattcaagaatcttatgcgaaatataatacaaaaacaacttatattgcctatggcgcagatttagctccaagtcttttgaaggataatgacgaaaaattagtaaattggtatcaagaaaagggtttggaatctaatggatattatcttgttgtaggtcggtttgttcctgaaaataattatgaaataatgattagggaattcatgaagtctgatacaaaaaaagattttgttttaataacaaatgtagaacaaaataaattttatgatcaacttaaacagacaactggatttgataaagataaacgaataaaatttgtgggaactgtatacgataaagagttaatcaaaaaaatcagagaaaatgctttcggatatttccatggtcacgaagttggaggaacaaacccaagtttaattgaagcattggcgtcatctaaattaaatctcctgcttgatgtaggatttaataaagaagtaggtgaagatgctgcactctattggaataaagaaaagcaaaatcttgcacaattaattaaacatgtagaagaaaccgattattctcacatggaaagtaaagcaaaagaaagagttcaacattatttttcttggaattatattgttggagaatatgagaaagtatttacgaaataatgattttctactgtgtagttttatataataaaaaaattgacgaagcaattactataaaaaatctatttgagtgtaatttagataacagaaaaattgtagtatttgataatagcgataaattagattttagagaatataattcaaaatattataacgaaaaaatatattgtttactacaatcttccgataaaaatgttggcctatcagcagcgtataatagaatattagaaaaattatgcagagagtttgatatagaaaacgaaaagcaatatgtttgttggttagatgatgacacagacatatctcctgaatttttaattaaacaagaaaaagccataaatgagaattatgatattattgttcctaaaattataggacaagatggaattgtctattctccaaatgaagcaggaaaaataaaaaataatttagttttaaataattcaaataaaaaaatttcaaagttaaaattcaatgctattaatagttgtttaacagtaaaaacttcaatttactcgaattttaaattcgatgaacatttatttttagatcaggtcgatcagctattttttgacaatttgagaaagagaaggttttcttataagatagttgatgtaacaattgaacagagtttttctcaaagaggagcagcaattggagaaagctatataaatagatttcgaattagagtcaaagatataatgcaatatggaagattatctcctaataataatattttttattcatatctgaaaaatattttactaggatttaactttttcagaaaaacctggaaattgtcttatattaagataggtataatttcaatttggagctataagaaatgaaaatattattttgtcaaacccaatttaaaatggggggacaacaaaaagtactgctttctattgctaaagaattaaataagaagcatgaagttacagtctattatgaaaatcataatttttttgattttgaagatttaaatattataaaagcaaagaggagttttcaggttcttaatttctttttggcaatcttgatatgcagcttcaccttaaaatttgataaaaaaacaattatcgacacatggcatctatacaacgctagggattcattgcgtaaagaaaagtatgatattgtagtcttattaaatccttatgtcttgtttgtagatgaatttagaaaatttatagacactcaaaaaattatttgttggacacataatttatttgaagattatatgtttaatagatttaaaacagaacaaagtaaattgaagctaagtatgtctcatgcagataaaattatttcactagaaaagtataccgcatcaaaatggcgtgaaataaataaaaacactgtagttattcataatcccttgacaattaaaaatgaatctggatacaacaaaaaaaattcaaaaaaaataggaatggttactaggattgatattaatcaaaaaggtttggatattctagttaaaatagccaaattgttgaacccttctacacaggtttttattgctggttcaggtacaaagagtgaagaaataaaattttctaatttattaattgaaaataaattagaaaaacagataatcttactaggaagcttaaaaggcgaagagttagtggaattttatagtagtttggccttattgttggtaacaagcaggaatgaagggtttcctttagtagtagcagaagcaatgagttttggaactcacattataggttttgatattccttcaatgcgagaagttacagcgggaggacaatttgggacattaattccttttgacaatactgaactatttgctaaaaatattgaggatttacaaaataggttcttgtccaaagattttgatttaaagtctgaagaactagtaagatatgcagggaaattgagggtgaataaaataataaaagaatgggaagaagctcttactaaataaatgagtaaaaaattagggagaaagtgtgagtataacaaagataaaaaataatataggaatttttatttttacaattttagtcatttcaacatttgctactgggggaattctgtcagaattagatgaaattgctgcggtatgctcatttctaattttgattttttcttttttttgttcttgtttgaagaaaaagatatccaagatatttttaattattttattatttattatatttggattgatttcaaacataataagtgggatagataggagtgtttttgatgtacttatagatattgtgactgttgggaagccattttggatttttttagctatgattcaactcgtatctccagatacttttggctggttacggagaaaattttctcttataataaaaatatttattttgatgttatatatttttctctttctcaataccctgcatattgttcaaatggggaatacatttttattttctcaaattccgaattttagtttcacttttggctttccagtgccctttgctattgttttatactgttgtataggatttttacttaaaaatgatataaacatagtgagacaaccatggattatttctctaatattcttgataatcttcactggtaaaatgcaatcttatatttttgtagtcattttcttaggctttttgtctataagaacatacagagagaaaaacttaaaaataagtagattaattttgataggctttataggcgttttaatttcactaccaaaattagtgaactactttgcaacaacatcttattctccgagaaagttattgatgactgatggatttggtttcgctttaaaatatttcccatttggaacagggtttgcaacgtttggttctgctatggctagtaaagactattcatcattatattatcaattaggttatagtaatttttatgggatgcaacctggtggtggtttaggttcctttttgaatgacaattggggggcttcattaattggacaatttggctttttaggaacaattttatttagtattataattgttagaatatactttttaatgattgaatattgggggaacgaaaaaattggtttatatttaatatcaggttttactggattaatttctataattataggatcaagtttttttacaggtgcttcaggagcattattaatggcaacttttggaataatagtttcttatagaaaaaatgagatattgccataaatttaatattggtattgacgttaagtcaagtttttagagtaacaaacgtagaattttaatctatttattttaagcacttaccttttcaaattgattaggtgtaagataccctaaactttgatggattcgatttgaattataaaaggcttcgatgtaccagaaaatactctgataggcttcttcaaagttcttatatttaaattgatacacccactctctttttaaatgtccatgccaagattcaagactggcattatgataagggtatccccttcgactgaaagagtgagtcatcccataatacttaagcaactcttcatactctagactcgtatactggcttccttggtcagaatgaagaataacagcttctggatagtcttgtgatttaatggccttatttaaagttctttgcactaattctacagtcattcgcttgcccaaatcccaagcaatgacttttttagtataacgatccataatggttgagagataagcccatccttgttgagtaggaatataagtaatgtcggttgaccaaaccttatttttctttgtaggttcagtctgtatgagattttttcgattgatgtgatcacttagtgagtatccaggcttaaatttcttaatgactacagacttgagttgaagttgcttcattagcttctgtaccagttttaacccgactttttccccttgtttaagtagaagatgatgaattttaggagcaccatagatttctcggttagcattgaagagttgagaaattttgagtgacaggtattgtctccttaattgagttttagatggttgtcggttaatccgttgataataacttgattcaggaacatcaaggagttgacagcttagtctgacattgagtgctaaagtttgtatggtttgagccatatccgcagcactcacttctttttctcggcgaatatggtcaatactttttttaagatgtctcgttcttccttaactttagccagttgtctttttaattctagaaaatcagctttagagacggagctttcattagatttagagtagaggtctatccatttataaattgttgcaggggccacgtcgtattctttagacagctgggtgacggattgaccagaatgatagaaggcgataagggtttctttaaattcttttgagtagcgttttttcatgtttttgtcctttgtctaaattatacaatagtgactctaagatttaaggataacatcacttttcttttgaccttaattttaagatttttaaacggagtgaaaaaaggcgaagcctatatatatatttatcttatatattttaatcttttgttcttttgtgtcaaaaaaagtcattgttttcaagggtttacagaataatgtactgacaaaaaattaaaaaagtcagtgaattatggtataataaaagcatgaagaaaaattctttggacggaatttcttcatgccaactacaaaacacgcaaattagcgtatctttatgtctattataccaaaaaatgaacaaaatcagaagcaggtgcaaatcttgaatgaacttgaaaaacgcaaagtagtagagaataatgcattaattaccagtgttgcgaaaatgtaaaaaacagctttaaaaatgtttgagttagcggtatcttgcatttttccccacattatgagatgtatatcactgggacacaatttaatattgcagatcaggggcagggacgtgtggttttggtcaaagtatttatcttgctcattttgcttactttattcttgttttataaaaaaagctatgctttgatttctgaacgtcatcaaagtttgatagctttgacaaccattggattaagtatcggtattgtattttataataatattttactcaatagaatagaaatgttttattcaattttaagcatagtatttattccaattgctatagattacattagtttgaaatttaaagaaaaagatactgtgcgacaaatgctgacgataggtattttttttaattacacttgtgccttactatatacaggttagcggtaattattcaggaatattaccttatgttattcaaccataaaaatataatttaaagaggaaataatgaaggatagaaagaaacaagcaattttgatactagctcacagaaatactctcgctctaaaatcaacaatagagcttttggattcccaatactttgatttctttcttcatatagataaaaaaagtagaattcaagatttttttgatttaaaaaaaattacaaaatcctccactattcatttttcagaaagaaaaaatgtacattggggaggtttttctatggtagaagcaatgtttgcgctattagaatgtgcacgtgatacaggagaatactcttattttcattttttatcaggaaatgatatgccaatcaaagataatgaaatagtatttaatttttttgaaaatagctatcctcaaaattttattgatattctagattttgaaaatgtcaataaaacttcatatttctacgaaacctctgagatgatagaggagagagtgaagtactactatcctcatatggatattctaaacagaaaaggaaaaattttcatagggaaaaaactaatttatctacaaaaattgttgaaagttgatcgcttgaaaaatagagagatagaaattttcaagggtcatcaatggtgtagtttgacaaatcaatttgtagatattttattggataaagaggaaagaagagtaggtaagtcttatttttcatctagtttaataccagacgaatgttattttcaaacgtatgctatgataaaaaaagttgaaatttatcaacagaaaaatatgtcagcacgcttaattgattggacgagaggtaagccatatatttggcgacaggatgatttttttgaaattatgaatgataaagattcaatgttttctaggaagtttgatgaaaatgtagatcgtaaaataattgaagaaatttatataaaaataagaggaagaagtactgatgaagcaaataaaatcaaagataagagatttacaaaataattttacctatgtttttgggaagaaaacttttcttggaaggggagaagcgattatcatagatgaacctgagcatggaaatttgggagatcaagcaattgcttttgcagaaaatcaatttttagtaaatcatgtatcagtacgagatgtagaacatcttatagaaagcaaaactatttcagaaataaaatctatgaaaaaaaatattggaaaaaaagaattagttttttttcatgggggaggaaatttcgggacactttatctaaagtatgagcgcattagaagagtggcagtatcaaagcttccctttaataaaatgattctatttcctcagtcaatttcatttgaagatagtaggtttggtcagaagcagctgaataaaagtaaaaaaatatacagtcaaaatacaaattttattttgactgcaagagaaccaaaatcttatggtttaatgaagaaatgttttccagataacaaagtaatcttgacaccggatatcgtgctctcattaaatttaacagaacagtatagaggaaataataggaatggtatcataacaatgctcagggaagatatcgaacaaaagcttaataaaactcaatttgaaaaaattatcaaagagctgacagataaatttgaagtcaccatttctgatacgcatattgggaaagaaaaggatagtggtataacttatgaaaatcgtcaacactatcttgagataaagtgggatgaaattgcgcagcatgaggtcgtcttaactgatagattacatggtatgattttttcatatatcacaggcacaccatgtgttgttttggctaataataatcataaaattgaagaaacatacaaacattggttgaatgaagtgaactatattcgttttattgaaaatccgactgttgaaaatattttagatgcaatcagtgacttaaagcaaatcgaacctcactatattgatttatctgataaatttcaaccactaattgatgcgataaaagggtaaagggttaatgaataaatacaaaaaactactatccaactcactcgttttcacaataggaaatttgggtagcaaactgttagtctttttactcgtaccactctacacttatgcgatgacaccgcaagagtatggtatggcagacttgtatcaaacaacagccaatctacttttgccactaattacaatgaatgtatttgatgcaactttacgttttgccatggaaaagtcaatgacaaaagagagagtgttaacaaattctcttgtagtatggtgttttagcgctgtgttctcttgtttgggcgcttttattatctatgcgttgaacttgagtaataaatggtatttatctttacttttaaccatcatcttattccaaggtgggcaaagcatactaagtcaatatgcgagaggcattggaaaatcgaaattatttgcagctggtggagttattttaacctttttgacaggcgctttaaatattctttttttggtatatttaccgcttgggattacgggctatttaatgtccctggttttagcgaatgtaggtacgattctattttttgctggcacactttccatttggaaggaaattagttttaaagtaattgataaaaaactgatttggcaaatgctctattatgccttacctttgattcctaatgccatcatgtggtggttactgaacgcatctaatcgctatttcgttttattctttttaggagcaggtgctaatggtcttttggcggtcgctaccaaaattccaagtattatttccatttttaatacgatttttacacaggcgtggcaaatttcagccatagaagaatatgattctcatcaaaaatcaaaatattattcggatgtttttcactacttagcaacttttctattgttagggacatcagcttttatgattgtgcttaaaccaattgtcgaaaaagtcgtttcaagtgactatgcaagttcatggcaatatgttcctttctttatgctggcgatgctattttcctcgttttctggattttttgggactaattatattgcggctaaacaaacaaaaggcgtatttatgacatctatctatggtgccattgtttgtgtcttattccaagtggttctgctacccaccatcggcttgaatggcgcaggtttatcagccttgcttggatttttaacaacgtttttattgcgtgtcaaagatacgcaaaaatttgtggcgattcagattaagtggcggatttttatcagtaatttattgatcgttttggcgcaaattttatgtttgttttatctaccgagtgaatttttgtattttgggcttgccctattattttgtggcatgttagtggttaatcagcgtacaattttatacattatcatggtgctaaaaaataagacatttggaatgaaatcctcataaaaatagacaggagatatatctcgatacacctcctgtctatttttatgctactcttgggttagctcaactcaaccgccttttaatctcccaacaacaataatacccaatcaaacaacccaaaaaattcaagataatatcactaatggcaaatgtgcccaaataaaagataaattgaatggtttcaattcctaaaagtgtgaccaaactgacaatgacaaactgtttgaaatcagtattgatacagtaaaggccacctaaaggaatgaagtagataatatttagcactgcctcttgaatcgttctggtatccgcttttataaagtcaaaaggattcagtgatatcgcctgaaaatccgttgttttagtaaaaagcaccatgaataacagtaataaatacacactgaaagcaagatagagataaataactgaaaaatgtttgaggtgatactggatgccaaacaaccagataatcagcgttaataagagtattaaagttaatgcggtatagtcaaagtggttaatcaacctagccaggctttgatagcgagtgagaacgggcataatcagccaagtaatcgtcgcataactcaggataaatgtgaccaataaactgctgaggtagatcatatattttcgcaactgtttctaactccttttcttgatgagattaaccctattttaacatattttaaaactgtcatgtttttatgaatttaaaataaagggcacctctaataactaccaattaattcacctctaaatgaaattagaaaaaaacacagaaaactaagcatagtctactgtgtttttctttatgttacagacgccacttgactgttaattcttattttagacagattacctccatgttttgagatttaaacgtttaacttgttcgtacctcaataagttataagtcagatttgtaaggtcagtatttaaaacagctcgatcgaatccaatagaacgtaaactagaaccatgcattgaattttcaacaaaggcaaatacatgttcaatacggacacgtattttcgaaatgattttattaaacattttatcgtctgccttaagagatttagaacgtgtgtttttaagacaggtaaaaagttcagcacctttaggtgttgcttgattttgataagctgagtctgctaaggtgatctcatcgggatcaacaagaacgcctattacttgagaatcatgcacatttgcaggcattgtttgataattctttacgaattttgatttggtatctatagcaatatgatttttgtagccatagtgtctctcattacctttaattgtccagcgagcagctgtatcctcctgtgctcttttgttcttcgtccaattcactggtaccctatttgctttaatcaattcattttcgtcttttggattacgttgtttaggcgcctctatgaatgttgcatcaacaatctgtcctttatgagcgatcatcccttgtgattcaagtttttcttgaaaggcagaaaaaagccagttccctctattagattttgatagctgatttctaaagttccagatagtctttgcgtctggtaccttgtcatcaatcttaaggaatcttctaaacgaaatccggtcaatcatttgatattccattgcatcatcagatagattgtataagcgttgtaaaattagaattttcaacattaaaacaaggtcatagggcggtctaccaccatgagatttgttttttaaatcatacttaaaaatccggttaagagttgggcgaaaacactcgaaatcaaccactttttctagccgctcaagagggtctccttttaaacttaatttttcaagatagtcgctatctccaaataaattcatcttcaatacctcgttagcttatttttaatctattatacctcttttcatacgtttttagaggtgcccttaaacttatatctttatttatacgtaaaatttcttgcagtttaaagtttgaaacccataccttcacttgcattaaaagattttatattatataatatattaattaaatacaagtatatctactgtgtgatgttaagccaagtccttagagtcaagagtgtataattttaatatattttttaagctatcactttttcaaattaattgggggtaagatatcctaaactttgatgaattcgtcttgataaaacgtttcaatgtaccaaaaaatactctgataggctgcttcaaattttttgcagtagttcctcagtcattcgcttacccaaattccaagcaatgatttttttagcataacgatttataatagttgagagataacaccaccctccgaagagtggtcttgtaaggaatatcggttgaccaaaccttatttttttctgtcgggtaagtatgtatgatattctttcggttaacaggatcatatatggatatcctggtttaaatttttttatgaccacagaatatagttgaagttgcttcattaacttttgtaccagttttaaactgtttttttccatgtttaagcaagaggtgagaatcttaggcactctatagatgacttgttcttccttaactttggccggtgtctttttaattacatttcatctacttttgagacatagatttcattaaacttggagtagaggtcatactctttagaaagctgagtgatgaatcgttctgagtggtaggactcgaccagggtttctttaaattcttttgaatatcgtttttgcatgactttttactttgtctaaattatacaattcccagtctaagatgtaagaataatatcagactacgcaatgttttttatattttgtatataatttagtgatcactaggatatcactaaattactctaacttcattatattacctagaccaaatgtgttatagcgaaataagtaaaaattatagttattacttttgatattattccagaagaagtgaattaaatttagttcagtagcagatagaaaattagagtttttttggcaaattgagatttgaatttgcttgcaatgagagctgcagttattgcgcttaaggaaatcggttgttgtaacagcaactaattatgatgatgtaaggacatattttaacatacgttttgtacgtgatttacatacattcgaaaagtttagatttgatcgtgactaaacaacaattttggaggaaaaattggaacgaaaaaaaaagaaaaaaaagaatatttgggttataattatacctatcttaatttttattacccttataggagcaggggcttatgccttaagaaattcacttattcctactgatcatacgaaaacaaatagttcggatcaaccgaccaaaacttcggcctctaacggttatgtagaacaaaaaggtgaagaagctgctgtgggtagtatagcacttgtagatgatgctggtactccagaatggatcaaagttccctcaaaggtaaatctagataaatttactgatttatctacgaataatatcactatttatcgaattaacaatccggaagtcttaaaaacagttaccaatcgtacggatcaacggatgaaaatgtcagaagttatagctaagtatcctaattctttgattatgaatgcttccgcctttaatatgcagacaggtcaagtgaccggttttcaaattaataatggaaaattaattcaagactggagtccaggtacaacggttcaatatgcctttgttattaacaaagatggttcatgcaaaatttatgattcaagtacaccagctgtaaccattattcaaaatggggggcagcagtcttatgattttggtactgcgattatccgtgatggtaaaattcaaccaagtgatggctctgtagattggaagattcatatttttattgcgaatgataaagataataatctctatgctattttgagtgatacaaatgcaggttatgataatataatgaaatcagtatcaaatttgaaactccaaaatatgttattacttgatagtggtggctcaagtcaactatctgtcaatggtaaaacgattgttgctagtcaagatgatcgagccgtaccggattatattgtgatgaaataaaaataaaagaacctcttggttctttcagactgaagacaaactccaaaaataattgcagtttgtcttttttctatgtaaaataaaggtattaagttattgattgagaggtttaggcatgtttcgtaaacaaacgatgattggtcgtagtcaaatgggcttctattctcttgaagatttagtccctcaagaacatcttctaagacatattgatcaatatgttgattttgaatttatctacgacttagttagagataaatacagtcttgaacatggtagaccaagccttgatcccgtcatgctcattaaactccctattattcaatatctttttggtattcaaagtatgcgccaaacgattaaagaaatcaaagtgaacgtggcttattgctggtttcttggtcttgatttccaagatgaagtgccacatttcacgacctttggtaaaaattatagtcggcgtttcaaagacacggacttatttgaacagattttctaccgtattttggatcaagtctttgaggcgaaattagttgaaccgagattggtttatcttgacgggacacatattaagcacacgctaatcgtcatcaatttgttaatcaagaagttgcggttgaagccttgatttatcaagaagcattagagaaagagactaacgaggtgcgggtaaaggctgaaaaaaagcccttcaaaaaatcagaagaaaaagacgtcaaaaacactaaagtatccacgacagattgtgatagtggttggtttcataaaggtgaacataaggaggtctttgcttattcagcacaggttgcctgcgatactcacagttgggtgctgggttacacagcagattgtggtaatcttcacgatagtcggactttttttgatttgtacgctaaattaatcgaaaaatttccagaaatagatacagttgtcgcagacgcagggtataaaacaccagccattgctaaaaagttgatcgatgatggtcgaactggcctatttccttacacgcgaccacgtgggaagaaagaactttttcgaaaacgagattttatttatgactatgtgaatcatacttacacatgcccaaatggtaaacagttgatttacaaaacgacccgacgtgatgggtaccaagaatatcgaactactagagcaaactgtgctacttgtccatttttagcacagtgtacaagctcacaaaacaaacagaagacagttttcagacatatttggcagctttatctagataaaatcgagcaaaatcgtttaacgacttggggtaagataacttataagcgacgtaaagaaacgattgaacgtttgtttgggactgccaaggaacatcataatttgagatatacacatgaaaatggccgagataaaatgcacatgaagcttggtcttacttttgcgtgcctgaacatgaagaaattagctaaaattatggcgaatagagataggggaaaggcggggattttcaatttttggatgattttcaaggtgataggttatcaaaaagcacaaatcgcttaagatttgtgcttttgtctacagtctgaaagaacctcttggttcttttattttagagatttttcaaaaagggttttgactgagtctaattctgtttgagaaactaccttagctccattttcatctgttgtatgtagattgagcttgctggtattctttagagccttattgtagctcataacgatcgttttagcatcattgaaacttatattggttttaacagtgtttgaaaaagcatagagaatttctcgatagtaattgaaactttcaagttttttcatatgagcaattttttgaatatttccgtagagttccattgagacattttgaatccgagtgattgaagcatccaaatcagtatcgtcaatttgtgtcatataggcttggacttgatcagcagtttgtaaattaacagttccttgtttaaactcataaccttcagcattgaatgcctttggattttgcatggtgattccaccagtggcctgtacaagtgatcccattttattaacatcgatctgaattactttgttaatggacaaattcaataggtctttaaccatctggaaaattccatcatctccattcgtattgtaaacttcagtgattgttttttgattaggcattgttgcaaaaaccgggaagttcatgaaagtagtttgatttgtctttacattcgttgaagctaaaacagtagcataagctgtatttttagaattatttttaccagttgcaatgataagtgtggtgaatgttttagacttttttaagtcgatacttgttgttttagggaaattttcatatgatgttgaaaatgttgattcaacatttctataagcggcgtaggctatagaagcaacagcgataattactaatacaaaaataattgaaataacttttagtactgtgtgttttttcttacgataatgacgcctctttttttgattcatggtatctccagatatatattata

SEQ ID NO: 224 - DNA, 21315 bp, Lactococcus lactis
  DSM 33138 eps gene cluster, complete sequence
atgaatgatttattttaccatcggctaaaggaactagttgaatcaagtggtaaatctgcaaatcaaatagaaagggaattgggttaccctagaaattctttgaataattataagttgggaggagaaccctctgggacaagattaataggactatcagagtattttaatgtgtctccaaaatatctgatgggtataattgatgagcctaatgacagttctgcaattaatctttttaaaactctaactcaagaagagaaaaaagaaatgtttataatttgtcaaaaatggctttttttagaatatcaaatagagttataacaataataaatttagggagtttttcttattaatatgatgaaaaaaggaatttttgtaattactatagtgatatctatagcattgataattggaggtttttatagttataattctaggataaataatctttcaaaagctgacaaaggaaaagaagttgtaaaaaatagcagtgaaaaaaatcagatagaccttacctataaaaattattataaaaatttaccaaaatcagttcaaaataaaatagatgatatttcatcaaaaaataaagaagttactttaacttgtatttggcaatctgattcagttatttctgaacaatttcaacaaaacttacaaaaatattatggaaataagttttggaacatcaaaaatatcacttacaatggcgaaactagtgaacaattattggctgaaaaagttgaaaaccaagtattagccactaatcctgatgttgttttatatgaagctccactttttaatgataaccaaaacattgaagcaacagcctcacggactagtaatgagcaacttataaaaaatttggctagtacaggagcagaggtgatagttcaaccctctccaccgatttatggtggtgttgtataccccgtacaagaagaacaatttaaacaatctttatctacaaaatatccctatatagactactgggctagttacccagacaaaaattctgataaaatgaaggggctgttttctgatgatggagtatatagaacattaaatgattcggggaataaggtttggctagattatattactaaatattttacagcaaactaattaagttataaataacaattattaaatattggagaaaaaatgcaggaaacacaggaacagacgattgatttaagagagatttttaaaattattcgcaaaaggttaggtttaatattatttagtgctttaatagtcacaatattagggagcatctacacattttttatagcctccccagtttacacagcctcaactcaacttgtcgttaaactaccaaattcggatagttcagcagcctacgctggacaagtgagcgggaatattcaaatggcgaacacaattaaccaagttattgttagtccagtcattttagataaagttcaaagtaatttaaatctatcggatgactctttccaaaaacaagttacagcagcaaatcaaacagattcacaagtcattacgcttactgttaaatattctaatccttacatggctcaaaagattgcagacgagactgctaaaatatttagttcagatgcagcaaaactattgaatgttactaacgttaatattctatctaaagcaaaagctcaaacaacaccaattagtcctaaacctaaattgtatttagcaatatctgttatagccggactagttttaggtttagccattgctttattgaaggaattgtttgataacaaaattaataaagaagaagatattgaagctctggggctaacggttcttggtgtaacaacttatgctcaaatgagtgattttaataagaatacgaataaaaatggtacgcaatcgggaactaagtcaagtctgcctagcgaccatgaagtaaatagatcatcaaaaaggaataaaagataggagttcaggatggctaaaaataaaagaagcatagacaataatcgttatattattaccagtgtcaatcctcaatcacctatttctgaacaatatcgtacgattcgtacgaccattgattttaaaatggcggatcaaggaattaaaagttttctagtaacatcttcagaagcagctgcaggtaaatcaaccgcgagtgctaatctagctgttggttttgcacaacaaggtaaaaaagtacttttaattgatggcgatcttcgtaaaccgactgttaacattacttttaaagtacaaaatagagtaggattaaccaatattttaatgcatcaatcttcgattgaagatgccatacaagggacaagactttctgaaaatcttacaataattacctctggtccaattccacccaacccgtctgaattattagcatctagtgcaatgaaagacttgcttgactctgtgtccgatttctttgatgttgttttgattgatactccacctctctctgcagttactgatgctcaaattttgagtagttatgtaggaggagtggttcttgttgtacgtgcctatgaaacgaaaaaagagagtttagcaaaaacaaaaaaaatactggaacaagttaatgcaaatatattaggagttgttttgcatggggtagactcttctgagtcaccgtcgtattactactacggagtatagtagttggaataaactttaatcaaataaaagacagaaatttgtaggataggagagcaaatgattgatattcattgccatattttaccggggatagatgatggagctaaaacttctggagatactctgacaatgctgaaatcagcaattgatgaagggataacaaccatcactgccactcctcatcataatcctcaatttaataatgagtcaccccttattttaaaaaaagttaaggaagttcaaaatattattgacgaacatcaattaccaattgaagttttacccggacaagaggtgagaatatatggtgatttattaaaagaattttctgaaggaaagttacttacagcagcaggcacttcaagttatatattgattgagtttccatcaaatcatgtgccagcttatgctaaagaacttttttataatattcaattggagggtcttcaacctattttggtccaccctgagcgtaatagtggaatcattgagaacccggatatattatttgattttattgaacaaggagtactaagtcagataacagcttcgagtgtcactggtcattttggtaaaaaaatacaaaagctgtcatttaaaatgatagaaaaccatctgacgcattttgttgcatcagatgcgcataatgttacgtcacgtgcatttaagatgaaggaggcatttgaaatgattgaagaaagttgtggttctgatgtatcacaaatatttcaaaataacgcagggtcagtgattttaaacgaaagtttttatcaagaaaaaccaacaaagatcaaaacaaaaaaatttttaggattattttaaagggattaaatggagtaaataatggaagtttttgaggatgtctcatcacctgaaccggaagagcataagttagtagaattaaaaaaattttctcatagagagataattataaaaagagggattgatattttagggggattagcgggttcagttttatttcttattgcggctgcattgctttatgtcccttacaaaatgagctcggaaaaagatcaagggccaatgttctataaacaaaaacggtatggaaaaaacggtaaaattttttatattttgaaatttagaacaatgattcttaatgctgagcagtatttagagctacatccagaagttaaagccgcctatcatgccaatggcaataaactagaaaatgacccccgtgtgacgaagattggttcatttattagacaacactcaattgatgaattaccacaatttatcaatgtccttaaaggggatatggcattagttggcccaagaccaattttactttttgaagcgaaagaatatggggagcgcctctcttatttactcatgtgtaaacctgggattactggttattggacaacacatggtagaagcaaagttctttttcctcaacgagcagatttagaactctattatctccaatatcacagcaccaagaacgatatcaagcttcttatgcttacaattacacaaactattcacggatcggacgcttactaaaaaatgaaggaaaaacatatttacattattggttcaaaaggaattccagcaaagtatggtggttttgagacttttgtagaagaactaacagcacatcagagtaataaaaaccttaagtatcatgttgcttgtttatcaaatgacatacaatcaaattttattcataatggtgccgactgttttaatattccaaagaaaaatattggaccagcaaatgccatttattatgatttggcagctttaaagtactcacttaaagaaattgaagaaaaaaattatatgggtgcaattatttatattttagcttgccgcattggtccgtttattggtcactataaaaagcaaatgaaaaaattaggaattactttgatggtaaatcctgatggggagtgtgaaataatatggacaaccagaaaaagcctgaattcatacgggtttgcgcggcttgaccttttcacctcaacttgtttctgcctgtcatggtgcgttgcggccggtttcataggttctaaccttgtgaaacgaatttatcaggaggctccttctgctacggttatcggcatcgacaacatgaatgcctactatgatgtggcactgaaagagttccgcctgaatgagctggccaagtatcccacatttaccttttatggataatccgaacttccgcttcgtgaaggctgatatctgtgaccgcgaagctgtgaataaattgtttgaagaagaacatccggacatcgtggtgaactttgcggcagagtctcatgttgaccgttctattgaagatcctggcatcttcctccagaccaacatcattggtaccagtgttctaatggatgcttgccgtaagtatggcattcggcgttatcatcaggtttctaccggtgaggtttacggtgacctgccgctggatcgtcctgacctgttcttcactgaggagactccgatccataccagctctccgtatagcagttccaaggctgctgctgacctgctggttctggcttaccaccgcacctacgggctgcctgtgaccatttcccgttgctccaacaactatggaccgtatcacttcccggagaagctgattccgctgatgatcgccaatgcactggctgacaagccgctgcctgtttacggcgaaggtctgaatgtccgtgactggctgtatgttgaagatcactgcaaggccatcgatctgattatccacaagggtcgtgtgggcgaagtctacaatgtcggcggtcataatgaaaagcagaacatcgagatcgtaaagatcatctgcaaggagctgggtaagccggagagcctgattacccatgttggcgaccgtaagggtcatgatatgcgttatgccatcgatccgaccaaaatccacaatgagctgggctggctgccggagaccaagtttgaggacggcattaagaagaccatccaatggtatctcgataatcgtgagtggtgggagaccatcatcagcggtgagtatcagaactactacgagaaaatgtacagcaaccgctaagaagccagaggaggaaagaatatgaagttttttgtaactggcgttggcggtcagctgggtcatgatgtgatgaacgagctgctgaagcgcggccatgagggtgtaggctctgatattcaggaaaattacagtggtgtggcagacggctccgcagtaacaaaagcaccgtattttgccttggatattacgaacaaggatgcagttgagaaagtcattacggaagtaaatccggacgcagtgatccactgtgcagcatggacggctgtggatatggcagaggatgacgataaagtggcgaaagttcgtgccatcaatgcgggcggcacacggaatattgcggatgtctgcaagaagctgaattgcaagttgacctatatcagcacggactatgtgtttgatggtcagggcacagagccctggcagccggattgcaaggattataagcctttgaatgtatacggtcagacaaagctggaaggtgagttggcagtcagccagacgctggagaagtatttcattgtccgcattgcttgggtgtttggcttgaatggcaagaactttattaagaccatgctgaatgttggtaagacacacgacactgttcgtgtggtcaatgaccagatcggcacaccgaccaatacatatgatttggctcgactgctcgtcgatatgaatgaaaccgagaagtacggctattatcatgcaaccaacgagggcagctacatcagctggttcgatttcacgaaagaaatttatcgtcaggctggatataagacagaagtcctgccggtgaccacggcagagtacggtctgagcaaggccgctcgtccgttcaacagccgtctggataagagcaagctggtggaagctggctttactccgcttccgacttggcaggatgcactgagccgttatctgaaagaaatcgagcagtgatagaggagatagagaaaatgggacagattaaggttgataaaaatgtaggcggcatcgagggactttgtgtgattgagcctgctgtgcacggtgatgcccgtggctattttatggaaacctacaacgaaaaagatatgaagaaagctggtatcgacattcattttgtacaggataatcagtccatgtccatgaagggcgtgctgcgcggtttgcatttccagaagcagtatccgcagtgcaagctggtacgcgccgtgcgcggaactgtgtttgatgtcgctgttgatcttagaagtaattctgagacctatggcaagtggtatggtgtgaccctgtctgccgagaataagaagcagttcctcattccggagggatttgcacacggattccttgttctgagcgatgaagcagagttctgctataaggttaatgacttctggcatccgaatgatgagggtggtatggcttggaacgacccggagattggcattgagtggcctggagtacagggtgagtacaagggtagcgcgagtgcggaaggctatgagttagaggatggcactgcgttgaatctgagtgataaagaccagaaatggctggcactgaaggatacttttaaattttgagaacacaggggtagaagaatgcagcgggaaaacgaagtacaacacgtatttctggtaggtgctaaaagcctaggagcatatggtggttatgaaacctttgtatataagctgacagaacaccatcagaataagaaaaatattaaatatcatgtggcgtgtaaagctaatggtgacggctgcatggacgaaacaaaagtggatggcgtaaagggaatcaatcaacatgagtttgaattccacaatgcgcactgttttaaaattgatattcctcagattggtgcagcacaggcaatttactatgatgttgcggcattgaatgcttgctgtaagtacataaaggaacataaaatcaaacatccaatagtttacataatggcttgccgcattggaccgtttgcaggtcatttttatcaggaaatccataagcttggtggtacggtctatttgaatccggatggtcatgaatggatgagagccaagtggtcggctccgattcgtaaatactggaagatttctgagcggatgatggtcaaatactgtgaccttgcaatctgcgattctgtgaatatcgaaaagtatatccacgagtgttacgacgggaaaggaatcaaaggcagaaatcctaagaccacattcattgcttatggtgcagatttgacactcagcaagctggctgatgacgatgaaaagctggtgaactggtataaggaaaaaggactggcgaagaagggctattaccttgtcgttggacgttttgtaccggagaactcttttgaagtgatgattcgcgagttcatgaagagcggaagcaaaaaagattttgcgcttatcacaaatgtgaacgataaatttctgaatgaattggaagagaaacttcatttcaagagtgacaagagaatcaagttcgttggtacagtgtatgaccaagaactcttgaagaagattcgagagaatgcttacgcatatttccatggacacacagttggaggtacgaatccatcattgattgaggcacttggcagcacggatttgaacctgctggttgatgttggttttaataaagaggtcgccgaagattgcgctttgtattggagccgcgaaccgggcagtcttgcaagattgattgatcgtgcagataagatgagtaccgaagaaatcgcggaaatgggtcgaaaagccaagaagcgtgtagctgaagagtatacatgggataaaatctgtggacagtatgaagaagtgttcacaaagtgagagcaaatgagggatcagacagtgaaaatctcgaaatattatagaacattcttaagaagaaaactaaatgcggagaatcgcaaacgtctaaaaaacaaaaactttacggtgctatgtaataactgtgtggggggggtgatccttcacgagttaggtgaacgctttaattcgccaacggtcaatttgttttttaaagcggaagattatctcaaatttttggagaacttagattattacttaaaacaggctcttgtagaagttggaagcgagaagaactaccctgttgcaaaactggatgatataacaatatatttcatgcattattcatcgtttgatgaggcaaaaataacttggcaaaaacgagtggcaagaattaacaaaaacaatttgtatgtaatttttgttcaacaaagcggttgtacagagcaggtcttggaggcatttgacaagcttccctataaacataagctggcacttactgcaaagccaatgccggagataaaatgctcttattgtattcatggtacagcgcaaccgaatggagaagtaatggatttgtgcaagtatgagggaaagtttactggcaaacgctggattgatgaatatgattatgtgggatttttaaataagaaatgatgtgaggaattgatatgtatgattatttggtggtaggctctggtctttacggagcaatatttgcgcatgaagcaaaagcgcatggaaaatctgtgctagttgtggataagcgtccgaacattgggggcaatgtctacaccgagaacattgagggcatcaacgtccacaagtacggtgcacatattttccataccaacaacaaaaaggtttggaattacatcacgcagtttgccgagttcaaccgctttacaaattctccggttgctaattataagggtgaactgtattcgttgcctttcaatatgtataccttcaacaagatgtggggcgttgtgacaccggaggaagccgctgcaaaaattgaggagcagcgcaaggaaatcactggcgagccgaaaaatctggaggagcatgccatctctctcgtgggccgcgacatctatgagaagctcatcaaaggttacaccgagaagcagtgggggcgtgactgcaaggatctgcctgccttcatcattaagcgtcttccggttcgtctgacttttgataataactatttcaatgcgttgtaccagggtatccccattggcggttacaccaagatgattgccaacttgctggacggcatcgaggtgcgcctgaacatcgactatctggaaaacaaggttgagctggatgcgctggctggcaaggtggtttacaccggtcccatcgatgcctactttgactataagctgggtacgttggagtaccgttctgtccgctttgagaatgagttgctcgacaagccgagctcccagggcaacgctgcggtcaactatacagaccgcgagacgccgtggactcgtatcattgagcacaagtggtttgagtttggtagggacgagaacggcaatgatttgcccaaaaccattatcagccgagagtatagcagtgagtggaagccgggtgatgagccgtattatccggtcaatgatgctaagaacagcttactgtattctgagtataagaaactggcagatgctgaaagtaaagtgattttcggtggtcgtttgggtgagtacaagtattacgatatggatcagattattgccgctgtattggagagatgcgaaagggaatttgatgtatgaatggaaaaataatcgttgttacacataaagagtataaaatgccatgtgatacagtgtaccttccagtatgcgttggcgttggcagagatgctttaaggaataagtatcaggctgacgatgaaggtgaaaacatctctgataagaatattctttattgcgaactgacagcactgtattgggcttggaaaaacttgaactgtgattatatcggactggctcattatcgtagatatctaactgagtcaaagagaagtaaaaacatagaggatgctctatctcagcatagaattgaagaactcttgatggactatgacataattgtacctagagagaaaaggtattctcaaacaatagccgaccattatattaactgtattaaaagcagaaaagatgcacacaaaattcatttacaattacttcgtgattcgattcttgaggtagctccagagtatattgcagaatacgataagaccatgaatgggcatagtgcacatatgcttaatatgtttgtgatgaaaaagcaaaatctggacaattactgcgagtggctatttaagattttatttgttttagaaaaaaaaatatatgaccatgatgtctactatgatcgtataatgggcgcatttagtgagttcctattggatgtatggattagaacaaataaaaagacgtatatagaggttgagttaatcgaaactgaaagagactattggggtaagattaaatgggctctgaaaagaaagctgtttgaataaggagataatataatgcgaatcctgcattactcactagggtttcccccttatcgaaggggaggcctgacaaaatattgtttggatcttatggtagcacaggaaatgcagggtaatgtggtagctatgtgctggcctggtgaaatcggaattatcaagaagaaaaaagttgcaataaaaaaaagaaaaaaatacagcataggaaagagtaagattgaaaattatgaaatacaagggattttacctgttcctcttttagagggaataaaaaatccggatctatttactgaaaaaaagaaccaagaaatttggaaactatttttaaagaactggagacctgatgttatccactttcatacattaatgggcttgccgctagaatatgttgaaacggcaagaaagcttggaataaaaacattatttacgacgcatgattattttggattgtgtccaaggacgactttggtgcgtcaaaatggcgaaatttgtgatggctgcacaccggaattgtgcgcggaatgctgtgagaatgctatcagttatagaaaattgaaaattctacaatcttcagtgtatagggttctgaaagatttagtaattgtaaaaaagctcagaaaaaaacattggaatgaatcgaaaaatgattctgcacaacatcaggcttctgttcagaacgcacaacgagcagaagaatatgttgagctacgaaaatattatataaaactactaaaaagttttaatatcatccattttaatagtagcaatacaagagatgtgtatttaaaagcggccaaggaggtgttaaacaacgaggtcgtttctatatcacatgaaatgataaaagataacaaaaagaaaaaaaggaaacacgagatattgcacctttcttatttgggaccggatacatataataaaggatactatgtattaaaagaaacactgaatcagttgcataaagaaggatataagtttcagttaaatatttattttgaggatgcttcggagccctttatcgtttcacatgcgccgtatcaatactcagaattaggcaaggtgatggatgatgcagattgcgttatattacctagtttggggaatgaaacatttggctttacagtcttagaagctctaagttatggagttcctgttattgttagtagtcgtgttggtgcaaaggatattgttgaagagggtaaaaacggatttgttgttgaaggtgatgtagactctttaaaaacaaagctgacaagtgtgttgaatcaacctgaaatattggaagatatgaataactatattgttgcaaatacacacattaaaacaatgacagaacattctaaagaaatcaaggacctgtatcaaaagtgacttgtatataaaaatggagaagattatggatttagataaaattagatggaattcagaggtcagtcatccaaattttatagctcaatatagatttgtaaaagcaaaaagattatgtgagtattgggctgacaaaaataagctgctgtacttatttgctcggatgcgatatgaacattataaagtaaaatataatacagatattcctgcccgttgtaaaatcggggggggtcaaaatcaggcatctcggaggtattgtatttaacccgggtgttgaaattgggaaaaatgttgattgcttaaatggcgttttgcttgggcaaatcgatttcggtgccaaagcaggtgtgccaagaattggtgataatgtgtttttaggaaccaattctattgttgtcggtaagattcaaataggaaatgatgtgttaattgctcctggtgcatatgtgaactttgatgttccggatcactctatagtaataggaaatcctggaaagattattgcaaaacaaaatgcgacaagaggatatatagcatcacctgttgaagattaaatgagcggataataaatagcgaggagttatgagtccgcacgttttctgcaaagggagaacaaattgtgcaagataaagtaagtattattgttcctgtatataaagttgagagggaactagatcgctgtgttcaaagtctgattaaacagacttataaaaatttggaaataattcttgtggatgatggtagtcctgatcaatgtcctgaattatgcgaaaattatgctgagatagataagagagttaaggtcattcataaagagaacggcggattatcagatgctcgtaatgcgggattgaaacaagcaacaggcaagtatattctgtatgttgattctgatgattatattgatttggatgcctgcgaaagatttataaaggcggcgggtaatcaaaaaatagatattgttgttggaaatgcaattatggaaaaaccagatggtaaagaaatgatgatacactcagcgacaccatctggaatcacctatactgccaaacagtttattatgagtgctgttaaagcatatcagtggtatgcccctgcatggcttaatatgtatagaagggactttcttcttgataatcagttatacttcaaaaaaggaatttactttgaggatgttcaaatgctgccacgtgtttttttggccgcaaaaaaaatcacatgcatatatggaacattttatcattatattattcgagaaaattcaattatgacgtctcagaaagacgagaaaaagaaaaacgattcaattcaaaatatgaaagagtggaaagagcagtttgatcttgtagatgatgtggccttgaaaaaatgcctatatggaatgcttgtgaaaatgtatatacacgaatgtaggcagtatgggattacgactaaagcaattgaaggaatggatgatagatttatattggggaactgtctcaattataaagaaagattaaaggctactatgtggttgtgctttccaaggctactgataaaacagtgaaggagtgcatatgagtgtttacatatttttatgggttgctgtagttgtatttggctttatcgcaagtagaagtaattataaagcaaaatattttgtgctcttttcttttttcctgatgacaattgttttaggactaagaggggctacagttggcgaagatacaaaaatgtatcttaatattgcagaaagagtaactaatatatcatggaaagaagtgttttctagctttccaacgagtcagtggagatatatttcatatggtggcttaagtggatttagtgagcagacggaaacagtttatttggcctattgcaaattgataatgcttatatttcataatgcacaggcagttcttcttataacagctgcaattacgaatgctctatttgcaaagtttattttagataacataacagtcaaacaagatgccatactggctgtttatatttacatgtgcgatgcgatgtttatgaattcgtttaatacaatgcgacaaattttggcaatatccattgcagtgcaatccatagaattaataaaaaaagaaaagtataagaaagcaatagcatgtgttctattagccgcatgcttccatcaatctgcaatagttttttttgttgccgatttattctatttattaaagaagaaaaaagaaagatatatttatctccttgtgactctttgtgcattgccagttttaatccctgtggctattaaagtggtcagtatcttctccagtaaatatgcaagttatttgtcagttagtttttggggagcacaactacgaggaacactcttgctctggataattattgcaattgttctgtttattatgatacgtgctaaccaatcggataatatagattggtggctaatctatatggcaacaatttacattggtgtagagcttgttggaatgcagttgacggttatatctagggtggcaatgtactttagaattttccttgtattgctctttccgattgctcaaaaatatttcactaaaaaaagtggacagttttataaaattggcgtggttatgctaatgactgtatcgttctttagttatgcgagttcgcctgatcgtttgtacactttttgcttttaatgatcaaagagggagggcagaggaatgcctattgcttcggtgataatacctacatataaaggaagtagtgccttaaatagggcaattgatagtgtgttgtgtcaatcatataaggaaattgaaaaaattgtagttgatgataatggttctgttgcaaagttttaaatctactatcaaataaggtagaataatagaaaaagatagcaggaggaatgacgatgaatcattttaaaggagagcaatttcagcaggatgtgattattgtagccgtgggctactatcttcgttataaccttagctatcgtgaagttcaagaaatcttatatgatcgtggcattaacgtttctcatacgacgatttatcgttgggtgcaagaatatggcaaactactctatcaaatttggaaaaagaaaaataaaaaatccttttattcatggaaaatggatgaaacgtacatcaaaattaaaggaaaatggcattatttgtatcgagccatcgatgcagatggtttaaccttggatatttggttacgtaaaaaacgggacacacaagcagcctatgcttttcttaagcggttagtgaagcagtttgatgaaccgaaggttgtagtcacagataaagccccctctattaaaagtgcctttaagaaactaaaagaatacggcttttatcaagggacagaacatcgtaccattaaatacctgaataatttgattgaacaagaccatcgtccagtaaagagacgcaataaattctatcgaagtttacgcactgcctcacccacgattaaaggcatggaagccattcgaggattatataagaaaacccgaaaagaaggcactctcttcgggttttcggtctgtactgaaatcaaggtattattgggaatcccagcttaaatcatagataccgtaagggattttattctttatttaaaactttgcaacagaaccaagatttgtataaaaaataaaaatatggaggtacaatcatgggaaaaattcctatgagtaaggtagacaaggagtctgttttaaacatgcttatcagcaatgaaaacagcgtgaagattccgcaagcggtggaagtggttgattatcaaacaggcgagttcgacagaggaggcgaaaaaggtctgatgtattgggctaatttatgcgttgttgatgttgaagagttagaacttctgaaaagtgttggtttggaagaaaatgctattctgattaagctgaaagtatctgattataataatgaaaatcttgaggttttaaaaggtaaagtgctagatactaaatctatggaaatagtgtttgtagagaaaaaaagtaaagtaggtaacgaaattacaggcttggcatttaaaacaagttttagagatttaagaggagtctgttttaaacatgcttatcagcaatcaaaacagcgtgaagattccgcaagcggtggaagtggttgattatcaaacaggcgagttcgacagaggaggcgaaaaaggtctgatgtattgggctaatttatgcgttgttgatgttgaagagttagaacttctgaaaagtctatattttggggggcactacagaaatggaacgctcttcggcttttcggtgtctactgaaatcaaggtattaatgggaataacagcctaagatatttggagttcacagagggcgcatttgattttcaaacttcgcaatagaaccaaatagggttaatctcatcaagaaaaggagttagaaacagttgcgaaaatatatgatctacctcagcagtttattggtcacatttatcctgagttatgcgacgattaattggctgattatgcccgttctcactcgctatcaaagcctggctaggttgattaaccactttgactataccgcattaactttaatactcttattaacgctgattatctggttgtttggcatccagtatcacctcaaacatttttcagttatttatctctatcttgctttcagtgtgtatttattactgttattcatggtgctttttactaaaacaacggattttcaggcgatatcactgaatccttttgactttataaaagcggataccagaacgattcaagaggcagtgctaaatattatctacttcattcctttaggtggcctttactgtatcaatactgatttcaaacagtttgtcattgtcagtttggtcacacttttaggaattgaaaccattcaatttatcttttatttgggcacatttgccattagtgatattatcttgaattttttgggttgtttgattgggtattattgttgttgggagattaaaaggcggttgagttgagctaacccaaaagtagcataaaaaggttctgttgcaaagttttaaatctactatcaaataaggtagaataatagaaaaagatagcaggaggaatgacgatgaatcattttaaaggaaagcaatttcagcaggatgtgattattgtagccgtgggctactatcttcgttataaccttagctatcgtgaagttcaagaaatcttatatgatcgtggcattaacgtttctcatacgacgatttatcgttgggtgcaagaatatggcaaactactctatcaaatttggaaaaagaaaaataaaaaatccttttattcatggaaaatggatgaaacgtacatcaaaattaaaggaaaatggcattatttgtatcgagccatcgatgcagatggtttaaccttggatatttggttacgtaaaaaacgggacacacaagcagcctatgcttttcttaagcggttagtgaagcagtttgatgaaccgaaggttgtagtcacagataaagccccctctattaaaagttcctttaagaaactaaaagaatacggcttttatcaagggacagaacatcgtaccattaaatacctgaataatttgattgaacaagaccatcgtccagtaaagagacgcaataaattctatcgaagtttacgcactgcctcacccacgattaaaggcatggaagccattcgaggattatataagaaaacccgaaaagaaggcactctcttcgggttttcggtctgtactgaaatcaaggtattattgggaatcccagcttaaatcatagataccgtaagggattttattctttatttaaaactttgcaacagaaccgagataataatcacgtctttttggaattgtttgcccttaaaatgattcatctgttgtcctcgcattcttttttattacattttacaataaatcgggtgttatggggaactttgcaacagaacctatttgaatttagtccagttctaactatcttttttttcaaatttaagctaaaatagatttttggaaaactttgcaacagaacccttagttttctgtgtttttttctaatttcatttagaggtgaattaattggtagttattagaggtgccctataaaataacttagagctttgtgggagctacccactaatactaatataaggagatagacaatggatttaaaagatttaataagtgttattgttccgatatacggcgttgaagaatatttaaataaatgtatcgactctattatcaatcaaacatataaaaatctagaaattattttggttgatgatggtagtccagataaatgtccagatatatgcgatacattcgaaaaaaaagatgagagaataaaggtaatccataaaaagaatggtggattatctgatgcgagaaatgccggtattgatacagcacatggagactatttcgtttttgttgatagcgatgattggattgaaaacacaatggtagagcatttgctcttcgcatgtaaaaaatataatgttgaaatggcaacttgtgctagatatattacagatggtcattcaactagagcagtcgcatttaatggtccagcaggagcatattcagctgaagaagcattgaatgaaatactcttaggaaagtcgatggatgttgctgcttgggataaaatttatgctcgtaatctatttgaagaaatacggtttccggttggtgaaaataatgaagacattgcagttttctataaactagtagacttggctggcagagtagcacataccggtacaacggaatatttttatcggagtcgtccgggcagtattacaaaattgaaatatagtacagatgccagaaaaatcatcgagaaaaatctgaattcaatagaaaaatttcttgataaaaagtatccaagctgtttgccaagtttttatcgttataaaacaatgaacatttatgcattgttgaataagtatattaaatgcgaaggaacaaagaaaacacaagaatttgagcatctgatgaacgagttccgaaaaaataagagctatttctttaatgatgatcagaccccatcaaaagaaaagaagattgccataatgattcttttgcatctttacaatccgtatttacttgtaaaagaaaagattacgggttataagtgacgaagggagaaattgagaaaatgattggttctgttgcaaagttttaaataaagaataaaatcccttacggtatctatgatttaagctgggattcccaataataccttgatttcagtacagaccgaaaacccgaagagagtgccttcttttcgggttttcttatataatcctcgaatggcttccatgcctttaatcgtgggtgaggcagtgcgtaaacttcgatagaatttattgcgtctctttactggacgatggtcttgttcaatcaaattattcaggtatttaatggtacgatgttctgtcccttgataaaagccgtattcttttagtttcttaaaggcacttttaatagagggggctttatctgtgactacaaccttcggttcatcaaactgcttcactaaccgcttaagaaaagcataggctgcttgtgtgtcccgttttttacgtaaccaaatatccaaggttaaaccatctgcatcgatggctcgatacaaataatgccattttcctttaattttgatgtacgtttcatccattttccatgaataaaaggattttttatttttctttttccaaatttgatagagtagtttgccatattcttgcacccaacgataaatcatcgtatgagaaacgttaatgccacgatcatataagatttcttgaacttcacgatagctaaggttataacgaagatagtagcccacggctacaataatcacatcctgctgaaattgctttcctttaaaatgattcatcgtcattcctcctgctatctttttctattattctaccttatttgatagtagatttaaaactttgcaacagaaccaaatatggtataatttaaggtatataatatatatatggagataccatgaatcaaaaaaagaggcgtcattatcgtaagaaaaaacacacagtactaaaagttatttcaattatttttgtattagtaattatcgctgttgtttctatagcctacgccgcttatagaaatgttgaatcaacattttccacatcatatgaaaatttccctaaaacaacaagtattgacttaaaaaagtctaaaacattcaccacacttatcattgcaactggtaaaaataattctaaaaatacagcttatgctactgttttagcttcaacgaatgtaaagacaaatcaaactactttcatgaacttcccagtttttgcgacaatgcctaatcaaaaaacaatcactgaagtttacaatacgaatggagatgatggaattttccagatggttaaagacctattgaatgtgtccattaacaaagtagttcagatcgatgttaataaaatgggatcacttgtacaggccactggtggaatcaccatgcaaaatccaaaggcgttcaatgctgaaggttatgagtttaaacaaggaactgttaatttacaaactgctgatcaagtccaagcctatatgacacaaattgacgatactgatttggatgcttcaatcacccggattcaaaatgtctcaatggaactctacggaaatattcaaaaaattgctcatatgaaaaaacttgaaagtttcaattactatcgagaaattctctatgctttttcaaacactgttaaaaccaatataagtttcaatgatgctaaaacgatcgttatgagctacaataaggctctaaagaataccagcaagctcaatctacatacaacagatgaaaatggagctaaggtcgtttctcaaacagaattagactcagtcaaaaccctttttgaaaaatctctaaaataatcgcaattatcgagcagagggactt

SEQ ID NO: 225 - protein, 105 aa, Lactococcus lactis; identical to SEQ ID NO: 200
  33138_epsR

SEQ ID NO: 226 - protein, 255 aa, Lactococcus lactis; identical to SEQ ID NO: 201
  33138_epsX

SEQ ID NO: 227 - protein, 259 aa, Lactococcus lactis; identical to SEQ ID NO: 202
  33138_epsC

SEQ ID NO: 228 - protein, 230 aa, Lactococcus lactis; identical to SEQ ID NO: 203
  33138_epsD

SEQ ID NO: 229 - protein, 254 aa, Lactococcus lactis; identical to SEQ ID NO: 204
  33138_epsB

SEQ ID NO: 230 - protein, 228 aa, Lactococcus lactis; identical to SEQ ID NO: 205
  33138_epsE

SEQ ID NO: 231 - protein, 216 aa, Lactococcus lactis; identical to SEQ ID NO: 206
  33138_GT1

SEQ ID NO: 232 - protein, 303 aa, Lactococcus lactis; identical to SEQ ID NO: 207
  33138_dTDP-glucose_4,6-dehydratase

SEQ ID NO: 233 - protein, 304 aa, Lactococcus lactis; identical to SEQ ID NO: 208
  33138_dTDP-4-dehydrorhamnose_reductase

SEQ ID NO: 234 - protein, 223 aa, Lactococcus lactis; identical to SEQ ID NO: 209
  33138_dTDP-4-dehydrorhamnose_3,5-epimerase

SEQ ID NO: 235 - protein, 410 aa, Lactococcus lactis; identical to SEQ ID NO: 210
  33138_DUF1972

SEQ ID NO: 236 - protein, 209 aa, Lactococcus lactis; identical to SEQ ID NO: 211
  33138_DUF1919

SEQ ID NO: 237 - protein, 371 aa, Lactococcus lactis; identical to SEQ ID NO: 212
  33138_UDP-galactopyranose_mutase

SEQ ID NO: 238 - protein, 252 aa, Lactococcus lactis; identical to SEQ ID NO: 213
  33138_DUF4422

SEQ ID NO: 239 - protein, 449 aa, Lactococcus lactis; identical to SEQ ID NO: 214
  33138_GT2

SEQ ID NO: 240 - protein, 308 aa, Lactococcus lactis; identical to SEQ ID NO: 215
  33138_GT3

SEQ ID NO: 241 - protein, 367 aa, Lactococcus lactis; identical to SEQ ID NO: 216
  33138_wzy

SEQ ID NO: 242 - protein, 326 aa, Lactococcus lactis; identical to SEQ ID NO: 217
  33138_GT4

SEQ ID NO: 243 - protein, 300 aa, Lactococcus lactis; identical to SEQ ID NO: 218
  33138_lytR

SEQ ID NO: 244 - DNA, 10297 bp, Lactococcus lactis
  DSM 33140 eps gene cluster, complete sequence
atgaatgatttattttaccatcggctaaaggaactagttgaatcaagtggtaaatctgcaaatcaaatagaaagggaattgggttaccctagaaattctttgaataattataagttgggaggagaaccctctgggacaagattaataggactatcagagtattttaatgtgtctccaaaatatctgatgggtataattgatgagcctaatgacagttctgcaattaatctttttaaaactctaactcaagaagagaaaaaagaaatgtttataatttgtcaaaaatggctttttttagaatatcaaatagagttataacaataataaatttagggagtttttcttattaatatgatgaaaaaaggaatttttgtaattactatagtgatatctatagcatttataattggaggtttttatagttataattctaggataagtaatctttcaaaagctgataaaggaaaagaagttgtaaaaaatagcagtgaaaaaaatcagatagaccttacctataaaaagtattataaaaatttaccaaaatcagttcaaaataaaatagatgatatttcatccaaaaataaagaagttactttaacttgtatttggcaatctgattcagttatttctgaacaatttcaacaaaacttacaaaaatattatggaaataagttttggaacatcaaaaatatcacttacaatggcgaaactagtgaacaattattggctgaaaaagttgaaaaccaagtattagccactaatcctgatgttgttttatatgaagctccactttttaatgataaccaaaacattgaagcaacagcctcactgactagtaatgagcaacttataacaaatttggctagtgcaggagcggaggtaatagttcaaccctctccaccgatctatggtggtgttgtgtaccccgtacaagaagaacaatttaaacaatctttatctacaaagtatccctatatagactactgggctagttacccagacaaaaattctgatgaaatgaaggggctgttttctgatgatggagtatatagaacattaaatgcttcggggaataaggtttggctagattatattactaaatattttacagcaaactaattaagttataaataacaattattaaatattggagaagaaatgcaggaaacacaggaacaaacgattgatttaagagggatttttaaaattattcgcaaaaggttaggtttaatattatttagtgctttaatagtcacaatattagggagcatctacacattttttatagcctccccagtttacacagcctcaactcaacttgtcgttaaactaccaaattcggataattcagcagcctacgctggacaagtgaccgggaatattcaaatggcgaacacaattaaccaagttattgttagcccagtcattttagataaagttcaaagtaatttaaatctatctgatgactctttccaaaaacaagttacagcagcaaatcaaacaaattcacaagtcattacgcttactgttaaatattctaatccttacgttgctcaaaagattgcagacgagactgctaaaatttttagttcagaagcagcaaaactattgaatgttactaacgttaatattctatccaaagcaaaagctcaaacaacacccattagtcctaaacctaaattgtatttagcaatatctgttatagccggattagttttaggtttagccattgctttattgaaggaattgtttgataacaaaattaataaagaagaagatattgaagctctgggactcacggttcttggtgtaacaacctatgctcaaatgagtgattttaataataatacgaataaaaatggcacgcaatcgggaactaagtcaagtccgcctagcgaccatgaagtaaatagatcatcaaaaaggaataaaagataggagttcaggatggctaaaaataaaagaagcatagacaataatcgttatattattaccagtgtcaatcctcaatcacctatttccgaacaatatcgtacgattcgtacgaccattgattttaaaatggcggatcaagggattaaaagttttctagtaacatcttcagaagcagctgcaggtaaatcaaacgagagtgctaatctagctgttgcttttgcacaacaaggtaaaaaagtacttttaattgatggcgatcttcgtaaaccgactgttaacattacttttaaagtacaaaatagagtaggattaaccaatattttaatgcatcaatcttcgattgaagatgccatacaagggacaagactttctgaaaatcttacaataattacctctggtccaattccacctaatccatcggaattattagcatctagtgcaatgaagaatttgattgactctgtgtccgattcctttgatgttgttttgattgatactccacctctctatgcagttactgatgctcaaattttgagtgtttatgtaggaggagtggttcttgttgtacgtgcctatgaaacaaaaaaagagagtttagcaaaaacaaaaaaaatactggaacaagttaatgcaaatatattaggagttgttttgcatggggtagactcttctgagtcaccgtcgtattactactacggagtagagtaattggaataaattttaatcaaataaaagacagaaatttgtagaagaggggagcaaatgattgatattcattgccatattttaccggggatagatgatggagctaaaacttctggagatactctgacaatgctgaaatcagcaattgatgaagggataacaactatcactgcaactcctcatcataatcctcaatttaataatgaatcaccgcttattttgaaaaaagttaaggaagttcaaaatatcattgacgaacatcaattaccaattgaagttttacccggacaagaggtgagaatatatggtgatttattaaaagaattttctgaaggaaagttactgacagcagcgggcacttcaagttatatattgattgaatttccatcaaatcatgtgccagcttatgcaaaagaacttttttataactgccatctgcagggaattcagcctattttggtccaccctgaacgtaatagtggaatcattgagaacccagatatattatttgattttgttggacaaggagtacttagtcagataacagcttcgagtgtcactggtcattttggtaaaaaaatacaaaagctgtcatttaaaatgatagaaaaccatctgacgcattttgttgcatcagatgcgcataatgtgacgtcacgtgcatttaagatgaaggaagcatttgaaattattgaagatagttatggttctggtgtatcacgaatgtttcaaaataatgcagagtcagtgatttcaaacgaaagtttttatcaagaaaaaccaacaaagatcaaaacaaagaaatttttaggattattttaaagggattaaatggagtaaataatggaagtttttgaggcatcatctgaactggaagagcataagttagtagaattaaaaaaattttctcgcagagagataattataaaaagagggattgatattttagggggattagcgggttcaggtttatttcttatcgcggctgcattgctttatatcccttacaaaatgagctcaaaaaaggatcaagggccaatgttctataaacaaaaacgctatggtaaaaatggtaaaattttttatattttgaaatttagaacaatgattcttaatgccgagcagtatctagaacttaatccagatgttaaagctgcttaccatgccaacggcaataagctagaaaacgatccacgggtaacgaagattggctcatttataagacgacactcaattgatgaactgccacaatttatcaatgttcttaaaggggatatggcattggttggcccaagaccaattttgctttttgaagcgaaagaatatggggagcgcctctcttacttactcatgtgtaaacctggaattactggttattggacaacacatggtcgaagtaaagttttttttcctcaacgagcagatttagaactctattatctccagtaccatagcaccaaaaacgatatcaagcttctagtactcacaattgtacaaagtattaacggatcggacgcatattaaaaaatgaaaatagcattagtaggttccagcggtggccatttgacacacctgtatttgttaaaaaagttttgggaaaacgaagatagattttgggtcacatttgataaaacagatgcaaaatctatattgaaagaagaaagattttatccttgttattatcccacaaatagaaatgtaaaaaacacgataaaaaataccattcttgcatttaaaatacttagaaaagaaaaaccagatttgattatttcgagtggtgctgcggtagccgttccttttttttggttaggtaaactattcggtgcaaagacagtctatattgaaatatttgaccggatcgataaaccaaccttaacaggaaaattagtttatccagttactgataagtttatagttcaatgggaagagttaaaaaaagtttaccctaaagcaattaatttaggaggaattttctaatgatttttgtaactgttggaactcacgaacaaccatttaatcgactcattcaaaaaattgatgaacttgtacgcgatggtgaaatcgaagacgatgtattcatgcaaattgggtactcaacttatgaacccaaatatactaaatgggaaaaggttattggatatgagactatggaaagatgtatgaatgaagcgagtacgattattactcatggcggaccatctacctatatgcaagtattacaactaggtaaaattccgatagttgttccacggcaaatgaaatttgatgagcatataaatgatcatcaactttgggtaagtaaacaggttgtgaaaaagggatactcattgattttgtgcgaagatgttgaagacattctcgaaaatattattagttccaaaatttcagataccttacaaaaaaatgtaaatcacaacactgaatttataaaattattcagtgctgaaatttaccagctatttataaaaagtgagaagatatgataccaaaagtaatacactattgctggttcggagggaaacctttaccagaatctgcgctaaaatgtattgaaagttggagaaggttttgtccagattatgaaataaaacaatggtctgagaaaaactatgatgtaaataaaattcaatatattaaggaagcatatcaagaaaaaaaatttgcttttgtaacagatgttgctcggctcgatataatttggaatgaaggcggtatatatcttgacacggatgtagagcttataaaatctcttgatgaattgctgtataatagtttatatttaggaatggaaagagctggtagagtaaatacgggtttagggtttggagctgaagtaaatcatccaattgtgagagctaatttagaattatatactaatattcctttttcaggcaatgataatataacttgtgtgacctatacgacgaatcttttgaaaaaatatggtctaaaaaacaacaatgaaattcaacatatagataacgcaataattttacctactgaatatttatgtcctctaagttttgaaacaaatcgattaaaaataacggaaaatacttactccatccatcactatgatatgagttggaaagataagagagataaatttttaagacttaaaatacaacttagaaaatgggtaggggatgatttttatgaaaaagttattaaaagaattggaaaataattatcatgaataaaataaccatgacaagagagatgagagtggttgccttatgtgtcgtaattttagaatatttaaataatacaggattaattgcgtcttcagtatactcttttagcatggcgagtacaatcctcttatcctatatcttattctgtaaaaaaagaaaaggattttctttaaaggagattattgtactactaatttcctttatttttgtagttttaaatcgtaatgctagtaattttagtttagggttaatgtggatactctattttatgttaagtaagtcggaaatagatttaaaaaaagtgatgaaaacattttttgttacctctagtgtttgttttattttgacaatagtactttatttaataatgtctcttaataaaagctctgatatgatgatgtggcgtggagatgcttttataaatcgtatgagtttaggatttatccaaccgaattttgcaatgatgagctttttaggtgtagcgatagcgttattatatttgagtactgaaagacaaagaataactataatttttattgccattgtaacttttattatattttactttactcaatcaagaacttcaggatatatcttattttttattttgagtattttatttgttagtagtaaaaaaactaaaaagcaagtttcaaattttgaaaaaaggagcgttacagttttaccactacttcttttaataatctcttattcgtcgttaaagttacctattaatcaatacctcaataacttgctttctggtcgtctgtcgctttatcaagagatttattctacatttggtatacatttgatagggaataatgatgttaaaaatacaatgttagacacagcatatcttcaaagtttgctagcaaaaggaattttgtttacattgtttttatttgtaactttctttttcatattttttcttaagagaaaaacacaaactaggttgcaaagtttagtaattatgatgtattttttaattgcatttacagaaacatcattttttaggtttgtaattttatttccagtattgatggtaataatggatcagaaagaggctaataaagtaatagaaaaggtggcatagtgagtattaataaaacagagattgaggaatacaaagtagccgttatagttcctgtttacaatgtagaggagtatataagagagtgcatcaaatctattcaagctcaaacatattctaatactgaaattattgttattaattgatgttatccttaaatcttagagtcactattgtataatttagacaaaggacaaaaacatgcaaaaacgctactcaaaagaatttaaagaaacccttatcgccttctatcattctggtcaatccgtcacccagctgtctaaagaatacgacgtggcccctgcaacaatttataaatggatagacctctactctaaatctaatgaaagctccgtctctaaagctgattttctagaattaaaaagacaactggctaaagttaaggaagaacgagacatcttaaaaaaagtattgaccatattcgccgagaaaaagaagtgagtgctgcggatatggctctaaccatacaaactttagcactcaatgtcagactaagctgtcaactccttgatgttcctgaatcaagttattatgaacagattaaccgacatccatctaaaactcaattaaggagacaatacctgtcactcaaaatttctcaactcttcaatgctaaccgaggaatctatggtgctcctagaattcatcatcttctacttaaacaaggggaaaaagtcgggttaaaactggtacagaagctaatgaagcaacttcaactcaagtctgtcgtccttaaaaaatttaagcctggatactccctaagtgatggtattaacagaaagaactttatacaaaatgagcctaaaaagataaataaggtttggtcaaccgacattacttatattcctactcaacaaggatgggcttatctctcaaccattgtggatcgttatactaaaaaagtcattgcttgggatttgggcaagcgaatgactgtagaattagtgcaaagaactttaaataaggccattaaatcacaagactatccagaagctgttattcttcattctgaccaaggaagccagtatacgagtctagagtatgaagagttgcttaagtattatgggatgactcactctttcagtcgaaggggatacccttatcataataccagtcttgaatcttggcatggacatttaaaaagagagtgggtgtatcaatttaaatataagaactttgaagaagcctatcagagtattttctggtacatcgaagccttttataattcaaaacgaatccatcaaagtttagggtatcttacacctaatcaatttgaaaaggtaagtgcttaaaataaatagattaaaattctacgtttgttactctaaaaacttgacttaacgtcataaaaaaatttgctaaaaatttggagcaaggtattataaaaattttaattaaaatttttatatttaaaaaactaaagaatactaaaagtaaaccttatacgagagatttatttggtcgtgactaaacaacaattctggaggaaaaattggaacgaaaaaaaaagagtaaaaagagtatcggggtgataattatacctatcttaatttttattacccttataggagcaggggcttatgccttacgagattcacttattcctactgaacatacgaaaacaaatagttcggatcaaccgaccaaaacttcggtttctaacggttacgtggagcaaaaaggtgaagaagctgctgtgggtagtatagcacttgtagatgacgctggagtaccagaatgggttaaagttccctcaaaggtaaatctagataaatttactgatttatctacggataatatcactatttatcgaattaacaatccggaagtcttaaaaacagttaccgatcgtacggatcaacggatgaaaatgtcagaagttatagctaagtatcctaatactttgattatgaatgcttccgcttttgatatgcagacaggacaagtagctggatttcaaattaataatggaaagttgattcaagactggagcccaggtacaacgactcaatatgcttttgttattaacaaagatggttcgtgcaaaatttatgattcaagtacaactgcttcaactattattaaaaacggagggcaacaagcctatgattttggtactgcaattatccgtgatggtaaaattcaaccaagtgatggctcagtagattggaagatccatatttttattgcgaatgataaagataataatctctatgctattttgagtgatacaaatgcaggttatgataatataatgaaatcagtgtcaaatttgaagctccaaaatatgttattacttgatagtggtggttcaagtcaactatccgtcaatggtaaaacgattgttgctagtcaagatgatcgagccgtaccggattatattgtgatgaaataaaaataaaagaacctcttggttcttttattttagagatttatcaaaaagggttttgactgagtctaattctgtttgagaaacgaccttagctccattttcatctgttgtatgtagattgagcttgctggtattctttagagccttattgtagctcataacgatcgttttagcatcattgaaacttatattggttttaacagtgtttgaaaaagcatagagaatctctcgatagtaattgaaactttcaagttttttaatatgagcaattttttgaatatttccgtagagttccattgagacattttgaatccgagtgattgaagcatccaaatcagtatcgtcaatttgtgtcatataggcttggacttgatcagcagtttgtaaattaacagttccttgtttaaactcataaccttcagcattgaatgcctttggattttgcatggtgattcccccagtggcctgtacaagtgatcccattttattaacatcgatctgaattactttgttaatggacacattcaataggtctttaaccatctggaaaattccatcatctccattcgtattgtaaacttcagtgattgttttttgattaggcattgtcgcaaaaactgggaagttcatgaaagtagtttgatttgtctttacattcgttgaagctaaaacagtagcataagctgtatttttagaattatttttaccagttgcaatgataagtgtggtgaatgttttagacttttttaagtcgatacttgttgttttagggaaattttcatatgatgttgaaaaggttgattcaacatttctataagctacgtaggctatagaagcaacagcgataattactaatacaaaaataattgaaataacttttagtactgtgtattttttcttacgataatgacgcctctttttttgattcatggtatctccatatacatattatatacctta

SEQ ID NO: 245 - protein, 105 aa, Lactococcus lactis; identical to SEQ ID NO: 200
  33140_epsR

SEQ ID NO: 246 - protein, 255 aa, Lactococcus lactis; identical to SEQ ID NO: 156
  33140_epsX

SEQ ID NO: 247 - protein, 259 aa, Lactococcus lactis
  33140_epsC
MQETQEQTIDLRGIFKIIRKRLGLILFSALIVTILGSIYTFFIASPVYTASTQLVVKLPNSDNSAAYAGQVTGNIQMANTINQVIVSPVILDKVQSNLNLSDDSFQKQVTAANQTNSQVITLTVKYSNPYVAQKIADETAKIFSSEAAKLLNVTNVNILSKAKAQTTPISPKPKLYLAISVIAGLVLGLAIALLKELFDNKINKEEDIEALGLTVLGVTTYAQMSDFNNNTNKNGTQSGTKSSPPSDHEVNRSSKRNKR

SEQ ID NO: 248 - protein, 231 aa, Lactococcus lactis
  33140_epsD
MAKNKRSIDNNRYIITSVNPQSPISEQYRTIRTTIDFKMADQGIKSFLVTSSEAAAGKSNESANLAVAFAQQGKKVLLIDGDLRKPTVNITFKVQNRVGLTNILMHQSSIEDAIQGTRLSENLTIITSGPIPPNPSELLASSAMKNLIDSVSDSFDVVLIDTPPLYAVTDAQILSVYVGGVVLVVRAYETKKESLAKTKKILEQVNANILGVVLHGVDSSESPSYYYYGVE

SEQ ID NO: 249 - protein, 254 aa, Lactococcus lactis
  33140_epsB
MIDIHCHILPGIDDGAKTSGDTLTMLKSAIDEGITTITATPHHNPQFNNESPLILKKVKEVQNIIDEHQLPIEVLPGQEVRIYGDLLKEFSEGKLLTAAGTSSYILIEFPSNHVPAYAKELFYNCHLQGIQPILVHPERNSGIIENPDILFDFVGQGVLSQITASSVTGHFGKKIQKLSFKMIENHLTHFVASDAHNVTSRAFKMKEAFEIIEDSYGSGVSRMFQNNAESVISNESFYQEKPTKIKTKKFLGLF

SEQ ID NO: 250 - protein, 226 aa, Lactococcus lactis
  33140_epsE
MEVFEASSELEEHKLVELKKFSRREIIIKRGIDILGGLAGSGLFLIAAALLYIPYKMSSKKDQGPMFYKQKRYGKNGKIFYILKFRTMILNAEQYLELNPDVKAAYHANGNKLENDPRVTKIGSFIRRHSIDELPQFINVLKGDMALVGPRPILLFEAKEYGERLSYLLMCKPGITGYWTTHGRSKVFFPQRADLELYYLQYHSTKNDIKLLVLTIVQSINGSDAY

SEQ ID NO: 251 - protein, 149 aa, Lactococcus lactis
  33140_UDP-N-acetylglucosamine-LPS_N-acetylglucosamine_transferase
MKIALVGSSGGHLTHLYLLKKFWENEDRFWVTFDKTDAKSILKEERFYPCYYPTNRNVKNTIKNTILAFKILRKEKPDLIISSGAAVAVPFFWLGKLFGAKTVYIEIFDRIDKPTLTGKLVYPVTDKFIVQWEELKKVYPKAINLGGIF

SEQ ID NO: 252 - protein, 168 aa, Lactococcus lactis
  33140_GT1
MIFVTVGTHEQPFNRLIQKIDELVRDGEIEDDVFMQIGYSTYEPKYTKWEKVIGYETMERCMNEASTIITHGGPSTYMQVLQLGKIPIVVPRQMKFDEHINDHQLWVSKQVVKKGYSLILCEDVEDILENIISSKISDTLQKNVNHNTEFIKLFSAEIYQLFIKSEKI

SEQ ID NO: 253 - protein, 235 aa, Lactococcus lactis
  33140_GT2
MIPKVIHYCWFGGKPLPESALKCIESWRRFCPDYEIKQWSEKNYDVNKIQYIKEAYQEKKFAFVTDVARLDIIWNEGGIYLDTDVELIKSLDELLYNSLYLGMERAGRVNTGLGFGAEVNHPIVRANLELYTNIPFSGNDNITCVTYTTNLLKKYGLKNNNEIQHIDNAIILPTEYLCPLSFETNRLKITENTYSIHHYDMSWKDKRDKFLRLKIQLRKWVGDDFYEKVIKRIGK

SEQ ID NO: 254 - protein, 364 aa, Lactococcus lactis
  33140_wzy
MNKITMTREMRVVALCVVILEYLNNTGLIASSVYSFSMASTILLSYILFCKKRKGFSLKEIIVLLISFIFVVLNRNASNFSLGLMWILYFMLSKSEIDLKKVMKTFFVTSSVCFILTIVLYLIMSLNKSSDMMMWRGDAFINRMSLGFIQPNFAMMSFLGVAIALLYLSTERQRITIIFIAIVTFIIFYFTQSRTSGYILFFILSILFVSSKKTKKQVSNFEKRSVTVLPLLLLIISYSSLKLPINQYLNNLLSGRLSLYQEIYSTFGIHLIGNNDVKNTMLDTAYLQSLLAKGILFTLFLFVTFFFIFFLKRKTQTRLQSLVIMMYFLIAFTETSFFRFVILFPVLMVIMDQKEANKVIEKVA

SEQ ID NO: 255 - protein, 300 aa, Lactococcus lactis
  33140_epsL
LERKKKSKKSIGVIIIPILIFITLIGAGAYALRDSLIPTEHTKTNSSDQPTKTSVSNGYVEQKGEEAAVGSIALVDDAGVPEWVKVPSKVNLDKFTDLSTDNITIYRINNPEVLKTVTDRTDQRMKMSEVIAKYPNTLIMNASAFDMQTGQVAGFQINNGKLIQDWSPGTTTQYAFVINKDGSCKIYDSSTTASTIIKNGGQQAYDFGTAIIRDGKIQPSDGSVDWKIHIFIANDKDNNLYAILSDTNAGYDNIMKSVSNLKLQNMLLLDSGGSSQLSVNGKTIVASQDDRAVPDYIVMK

SEQ ID NO: 256 - protein, 300 aa, Lactococcus lactis
  33140_lytR
MNQKKRRHYRKKKYTVLKVISIIFVLVIIAVASIAYVAYRNVESTFSTSYENFPKTTSIDLKKSKTFTTLIIATGKNNSKNTAYATVLASTNVKTNQTTFMNFPVFATMPNQKTITEVYNTNGDDGIFQMVKDLLNVSINKVIQIDVNKMGSLVQATGGITMQNPKAFNAEGYEFKQGTVNLQTADQVQAYMTQIDDTDLDASITRIQNVSMELYGNIQKIAHIKKLESFNYYREILYAFSNTVKTNISFNDAKTIVMSYNKALKNTSKLNLHTTDENGAKVVSQTELDSVKTLFDKSLK

SEQ ID NO: 257 - DNA, 16953 bp, Lactococcus lactis
  DSM 33142 eps gene cluster, complete sequence
atgaatgatttattttaccatcgtctaaaggaactagttgaatcaagtggtaaatctgcaaatcaaatagaaagggaattgggttaccctagaaattctttgaataattataagttgggaggagaaccctctgggacaagattaataggactatcagagtattttaatgtgtctccaaaatatctgatgggtataattgatgagcctaatgacagttctgcaattaatctttttaaaactctaactcaagaagagaaaaaagaaatgtttataatttgtcaaaaatggctttttttagaatatcaaatagagttataacaataataaatttagggagtttttcttattaatatgatgaaaaaaggaatttttgtaattactatagtgatatctatagcattgataattggaggttttttatagttataattctaggataaataatctttcaaaagctgataaaggaaaagaagttgtaaaaaatagcagtgaaaaaaatcagatagaccttacctataaaaagtattataaaaatttaccaaaatcagttcaaaataaaatagatgatatttcatccaaaaataaagaagttactttaacttgtatttggcaatctgattcagttatttctgaacaatttcaacaaaacttacaaaaatattatggaaataagttttggaacatcaaaaatatcacctacaatggcgaaacaagtgaacaattattggctgaaaaagttcaaaatcaagtattggcgactaaccctgatgttgttttatatgaagctccactttttaatgataaccaaaacattgaagcaacatcctcatggactagtaatgagcaacttataacaaatttggctagtacaggagcagaggtgatagttcaaccctctccaccgatttatggtggtgttgtgtaccccgtacaagaagaacagtttaaacaatctttatctacaaagtatccctatatagactactgggctagttacccagacaaaaattctgatgaaatgaaggggctgttttctgatgatggagtatatagaacattaaatgcttcggggaataaggtttggctagattatattactaaatattttacagcaaactaattaagttataaataacaattattaaatattggagaagaaatgcaggaaaaacaggaacagacgattgatttaagagggatttttaaaattattcgcaaaaggttaggtttaatattatttagtgctttaatagtcacaatattagggagcatctacacattttttatagcctccccagtttacacagcctcaactcaacttgtcgttaaactaccaaattcggataattcagcagcctacgctggacaagtgaccgggaatattcaaatggcgaacacaattaaccaagttattgttagtccagtcattttagataaagttcaaagtaatttaaatctatctgatgactctttcaaaaaacaagttacagcagcaaatcaaacagattcacaagttattacgcttactgttaaatattctaatccttacattgcacaaaagattgcagacgagactgctaaaatttttagttcagatgcagcaaaactattgaatgttactaacgttaatattctatccaaagcaaaagctcaaacaacaccaattagtcctaaacctaaattgtatttagcgatatctgttatagccggactagttttaggtttagccattgctttattgaaggaattgtttgataacaaaattaataaagaagaagatattgaagctctggggctcacggttcttggtgtaacaacctatgctcaaatgagtgattttaataagaatacaaataaaaatggcacgcaatcgggaactaagtcaagtccgcctagcgaccatgaagtaaatagatcatcaaaaaggaataaaagataggagttcaggatggctaaaaataaaagaagcatagacaacaatcgttatattattaccagtgtcaatcctcaatcacctatttctgaacaatatcgtacgattcgtacgaccattgattttaaaatggcggatcaagggattaaaagttttctagtaacatcttcagaagcagctgcaggtaaatcaaccgagagtgctaatatagctgttgcttttgcacaacaaggtaaaaaagtacttttaattgatggtgatcttcgtaaaccgactgttaacattacttttaaagtacaaaatagagtagggttaaccaatattttaatgcatcaatcttcgattgaagattccatacaagggacaagactttctgaaaatcttacaataattacctctggtccaattccacctaatccatcggaattattagcatctagtgcaatgaagaatttgattgactctgtgtccgatttctttgatgttgttttgattgatactccacctctctctgcagttactgatgctcaaattttgagtagttatgtaggaggagtggttcttgttgcacgtgcctatgaaacaaaaaaagagagtttagcaaaaacaaaaaaaatgctggaacaagttaatgcaaatatattaggagttattttgcatggggtagactcttctgactcaccgtcgtattactactacggagtagagtaattggaataaattttaatcaaataaaagacagaaatttgtagaagaggagagcaaatgattgatattcattgccatattttaccgggtatagatgatggagctaaaacttctggagatactttgacaatgctgaaatcagcaattgatgaagggataacaaccatcactgccactcctcatcataatcctcaatttaataatgaatcaccgcttattttgaagaaagttaaggaagttcaaaatatcattgacgagcatcaattaccaattgaagttttaccaggacaagaggtgagaatatatggtgatttattaaaagaattttctgaaggaaagttactgacagcagcgggcacttcaagttatatattgattgaatttccatcaaatcatgtgccagcttatgctaaagaacttttttataatattcaattggagggacttcaacctattttggtccaccctgagcgtaatagcggaatcattgagaaccctgatatattatttgattttattgaacaaggagtactaagtcagataacagcttcaagtgtcactggtcattttggtaaaaaaatacaaaagctgtcatttaaaatgatagaaaaccatcttacgcattttgttgcatcagatgcgcataatgtgacgtcacgtgcatttaagatgaaggaagcgtttgaaattattgaagatagttatggttctgatgtatcacgaatgtttcaaaataatgcagagtcagtgattttaaacgaaagttctcatcaagaaaaaccaacaaagatcaaaacaaaaaaatttttaggattattttaaagggattaaatggagtaaataatggaagtttttgaggatggctcatcacctgaaccggaagagcataagttagtagaattaaaaaaattttctcacagagagataattataaaaagagggattgatattttagggggattagtgggttcaggtttatttcttattgcggctgcattgctctatgtcccttacaaaatgagctcggaaaaagatcaagggccaatgttctataaacaaaaacgctatgggaagaatggtaaaattttttatattttgaaatttagaacaatgattcttaataccgagcagtatctagaacttaatccggatgttaaagctgcttaccatgccaacggcaataagctagaaaacgatccacgggtaacgaagattggatcatttataagacgacactcaattgatgaactgccacaatttatcaatgttcttaaaggggatatggcattagttggtccaagaccaattctgctttttgaagcgaaagaatatgggaaacgcctcccttacttactcatgtgcaaaccaggaatcactggttattggcaagttcctctattttcagataatggagtacttcaatcagcaaagggggtggcatgaatggctccaatagattcagaagttatagacactaaagataattctaaagttttaaatgatgttgttgcgagtgaatctgttatagtaccagttaacaacaaagtaaaaaaatcaaaagcaattttgcataaaattgaaagagcttcatattttagcattaaaagaatcttcgacataatttgctcattgcttggcattatagcattaattccagtagcaatagtaactaaaatatgttacatagcaacaggagataaaaaatcaatattttataaacaaaagagaatcggaaaaaatggtaaaccgatatatatatataaatttagaagtatggtatggaatgcagatgaagtgttaaaagaacttttaaaagaccctaagtataaaaaagaatgggacttaaatcaaaaatttgaaaatgatccgagaataacaaaaatgggaaatattttaagaaaaacatcattagatgaattgccacaattcatcaatgtaattaaaggtgatatgtctatgataggacctcgacctttagttgaaggagagcttaatgctcataaaggaaatcatgcaatatatgaaagtgttcgcccaggcctctcggggtggtgggccgcgaacggaaggtcagctactacttatgaaagaagacttgaattagaatatttctattgtaaaaattgtaatttaatattagatattaagtgtgtattcttaacaatagcagtagtgttatttaaaacaggagcaaagtagtatcaaactataatgaacccgaattgctagttgattatttagccatgacttgatacccgatagaatatcttaaagtctctggttccagtgatttagctgattttaacagtaaagaatacgctaaaagtatcatctctaatttcaattgaaaaacttgaggcgaacgacttttacaacgctcagctcctagatttgtcaaaaaagagaaaactcgctcaatcacttttctacgttttgaaaaattagggaaaaggattttcttttgcttcatgttcttcctgacaggtgtcattagatcaattccttttaattccagcctatcatgcagtgactgacctaaatatcccatatctccaaggactgttggtgtcccaaattgactcaacacttcctcggtcattgaactatcagccattgaagcaggagtaattgtgtagtctatgacatagcctgattcactgactaaagcatgacatttacatccatagaagtactgtccctttgtagcattgtagccaacatttgcataatctccaagacctttgcttctgaaattacgaataggctgacacaaaggaatggggaagctgtcaataatggatacactcattccttcaacctctttaaagacgagtgcttggcgaatgacttggatactcggtaagagggcattacaacggcggacaaagcgagaatattctaggaaattaggaaataaactttgagcaagttggtgcttagctttaagcgtttcactaaaatgcagtacgccccataggtaacaagcgataactaagcaatctgatgttgcgagatggacgttctttcggttttgaacctcaaggggaacactcgtttgataaagcgtctcaatggttgtcagtaaataaacaaaaacttttcgaagtgtgctattataagtcatataagtcgtgcgctttctaatgcttagtagtttaagattaggatagcacgacttatttattttccaatgaaattaactagcaattcgggtaatatatatatggaggtaccatgaatcaaaaaaagaggcgtcattatcgtaagaaaaaacacacagtactaaaagttatttcaattatttttgtattagtaattatcgctgttgcttctatagcctacgccgcttatagaaatgttgaatcaacattttcaacatcgtatgaaaatttccctaaaacaacaagtatcgacttaaaaaagtctaaaacattcaccacacttatcattgcaactggtaaaaataattctaaaaatacagcttatgctactgttttagcttcaacgaatgtaaagacaaatcaaactactttcatgaacttcccagtttttgcgacaatgcctaatcaaaaaacaatcactgaagtttacaatacgaatggagatgatggaattttccagatggttaaagacctattgaatgtgtccattaacaaagtaattcatattgatgttaataaaatgggatcacttgtacaggccactggtggaatcatcatgcaaaatacaaaggcattcaatgctgaaggttatgagtttaaacaaggaactgttaatttacaaactgctgatcaagtccaagcctatatgacacaaattgacgatactgatttggatgcttcaatcacccggattcaaaatgtctcaatggaactctacggaaatattcaaaaaattgctcatatgaaaaaacttgaaagtttcaattactatcgagaaattatctatgctttttcaaacactgttaaaaccaatataagtttcaatgatgctaaaaagatcgttatgagctacaataaggctctaaagaataccagcaagctcaatctacatacaacagatgaaaatggagctaaggtcgtttctcaaacagaattagactcagtcaaaaccctttttgaaaaatctctaaaataaaagaaccaagaggttcttttatttttatttcatcacaatataatccggtacggctcgatcgtcttgactagcaacaatagttttaccattgacagatagttgacttgagccgccactatcaagtaataacatattttggagcttcaaatttgacactgatttcattatattatcataacctgcatttgtatcactcaaaatagcatagagattattatctttatcattcgcaataaaaatatggatcttccagtctactgagccatcacttggctgaatcttaccatcacggataattgcagtaccaaaatcataggcctgttcccccccatttttaataatagttgaagcaggtgtacttgaatcatagattttgcatgaaccatctttgttaataacaaaggcatattgaaccattgtacctggactccagtcttgaatcaactttgcattgttgatttggaagccagctacttgtcctgtctgcatatcaaatgccgaggcattcataatcaaggtattagggtatttagctataacttcggacattttcattcgttgatctgtacgattggtaactgtttttaggacttctggattattaattcgataaatagtgatattattcgtagataaatcagtaaatttatctagatttacctctgagggaaccttaacccattttggtacaccaacatcatctacaagtgctatactacccacagcagcttcttcacctttttgctccacgtaaccgttagaagccgaagttttggtcggttgatccgaactatttgttttcgtatgttcagtaggaataagtgaatctcttaaggcataagcccctgctcctataagggtaataaaaattaagataggtataattatcacccagatattatttttcgtctttttttttcgttccaatttctcctccaaaattgttgtttagtcacgaccaaataaatctctcgtgtaaactttggttttaacatcctcaagttctttagtataacgatttgaaacaataacatcagaaatcattttaaactcatctagattatgaactacccgagaattgtagaactgatcatctgtgagtgtcggctcatagacaactacttcaattcccttgcctttaattcgtttcataattccttgaattgaacttgatctaaaattatcagaatttgacttcattgtcaagcggtagatgcccaccactttgggataccgtttaatgatcatatctgcgatatgatcttttctcgtcctatttgattcaacaacagcctcaattaatttctcagaaacttggtcatagttagccaaaagctgtttggtatctttcggtaagcaacctgtcgcttctattgtgtgtaatattcttaacaaaaaccaaaagaaaacctgtatttatgcaggttttaagtaacttttgtttttcttaacatattctagtaaattttgataaatatcttgatatttaaaaacaatctcgactcttttatcttcaaaaatatatatgcattctataaatttaaaaagtatatctctatcaattttcttaaataattctctattgttaaaaagttttattaaatcaacttgataatttggaatattatctaattcttccaattccttatcaattattttaattgtttctctaatttctaaaatttcattattatatgaacttgaataatttttataatcttcgaaagttattatttcttctttccaatctgtatataaagattgttttgatgttatccttaaatcttagagtcactattgtataatttagacaaaggacaaaaacatgaaaaaatgctactcaaaagaatttaaagaaacccttatcgccttctatcattctggtcaatccgtcacccagctgtctaaagaatacgacgtggcccctgcaacaatttataaatggatagacctctactctaaatctaatgaaagctccgtctctaaagctgattttctagaattaaaaagacaactggctaaagttaaggaagaacgagacatcttaaaaaaagtattgaccatattcgccgagaaaaagaagtgagtgctgcggatatggctcaaaccatacaaactttagcactcaatgtcagactaagctgtcaactccttgatattcctgaatcaagttattatgaacggattaaccgacatccatctaaaactcaattaaggagacaatacctgtcactcaaaatttctcaactcttcaatgctaaccgagaaatctatggtgttcctaaaattcatcatcttctacttaaacaaggggaaaaagtcgggttaaaactggtacagaagctaatgaagcaacttcaactcaagtctgtagtcattaagaaatttaagcctggatactcactaagtgatcacatcaatcgaaaaaatctcatacagactgaacctacaaagaaaaataaggtttggtcaaccgacattacttatattcctactcaacaaggatgggcttatctctcaaccattatggatcgttatactaaaaaagtcattgcttgggatttgggcaagcgaatgactgtagaattagtgcaaagaactttaaataaggccattaaatcacaagactatccagaagctgttattcttcattctgaccaaggaagccagtatacgagtctagagtatgaagagttgcttaagtattatgggatgactcactctttcagtcgaaggggatacccttatcataatgccagtcttgaatcttggcatggacatttaaaaagagagtgggtgtatcaatttaaatataagaactttgaagaagcctatcagagtattttctggtacatcgaaggcttttataattcaaaacgaatccatcaaagtttagggtatcttacacctaatcaatttgaaaaggtaagtgcttaaaataaatagattaaaattctccgtttgttactttaaaaacttgacttaacgtcatttcataaagttttctataaatttcttttaaagaatgtttaaagttaaaaacaagtaaaacagtataataataatactttattcctttattttccttgtactttgatctggtatttttcattccccaataaaaatcgtaacttcttaaattttttttgaatttatttgagtctaagtattctttaatcattgtttctgttacttctcctaatgggttatttttataatattttcttaaatactttgcaatcaattcttgctttcctgcattttttcttgatatactttgtggactaattctatacttcaataatatatcttgaacatttccgatagttataccatttccaactgccctcaataaaaaatcataatcttcacaagaaaaaacattattatatccatttagtttttcataaacattctttctaacaaaataagtaggatgtgatacacaattttttataaaaagtagtttttttacattctctgcttttcttggaaaaatgatatctttgaaatctacattatcaataaaacatgtaacatttgatccacacatgtcatagcctgtttcttttaaaaattcatattgtttttcaaaacgtatcggaagagctatatcatctgcatccatcctagctatatattctccagttgcattttttaatgctttattcaaacttttaggaagacctatatttttttcattaatgataattttcattctatcatctttatatgattttaaaaagtcaattctccacttttcatctggattatccacaactataataagttctaaattagaataagtttgattaagtatagattcaattgatgatttaagttcattttcactttctttatatattgacattataacactaactttttctttcattttctatctcctttgctggtacaccaactaatactccacttttaaagtttttatttactacagcattcgcgccaacttttatatcatcgcctaaaacaacatcacctataattactgccccaaagcctacatcacaattatttcctattattggtgcatatccgtctaatcctttatttcctatacaattattaccatgtagtttaaggttcttcccacatttagccaaaccactaactacaatttctccagaatgataaattattagcccttcatcaattgtattaatacttgcgaaaatacccattcttttacctatacaattttttctgtaaatatggtatgcatataatggaaaaaagattttatttttttgattataataatattcggcttttcttaaatgcttttgaaatctccatatatctatcttttcatttcctgacaaaactttttttatataatctttcttattttcaatatacgcttttttttcaagattcaaaacatgcattaatttttttctatcacttatcatctttaatttctcctaactttttataattatttcctattaaaaaaattataaaaataaatattggataataatatgttatttctgtcatcatcattattaaaaagctaaaaataattgcaacatttaatgaatttatttttttattatcgattttatttggaaatccttgtttaaaaatcatcataaacaatgttaaagttccaaatataccacactcacacatagattgtaaaatagtattatgtgcttgccataatccattatgatagctaataatatttccgtcattaacatatccaaatccaaataaaaaataattttttgccacataaattgcattttcccatattatagttctacccgtcaacgtaatatctttgtttaataattcaaaaaggccactaaatagatttaacaaatttccatttattaaattaatggacaaagcaattaaaattaaaaatccaaaacaataaactaaacttagtttctttttatttctcaataatctcaataataaataaaacaaaatagttaacacaataacaacaatacctgtggcaacccatttagataatatatttataattgctaatacatacgatgtaattagtttttttcgatcttttttattctttgaagaatactcgttgtaataaattaaagaaatgtacataagagcgattgaaaattccgtaaaacgagttcttattcctaaaaaataaataccatactgtggaaatattccattaggataaataatcattaataaaatattaattagaacataactaaaaatcattttgtatacaattctaaatgcatccttatcgcaaatataattttttattaataaatacaagccaacaaatacaaccgattgatagccccatttaacaatttcaccattatgattcaatgttggtataaatatcagaagtctccataatagtaaaaggaaaatggtaatatcaaatttaacattttttttaaatgaccttaataataaaattaacgtacataataaggccattccaatactcatataattaagcacattgatttttacaaaaaaattaggctgaataaatgcaaaaaaacaaagtgcaatgaaaattttttctttagttttcatcatgagcccccttagaatatattttttctattacatttattaatttatctgtatcataatctaatagtttttctgaataacgttcttctcttttcatattaaaattattgaaaaattgtatccattcgtcagcgttgtcaatatccaagaatttaacattgttatttaattttacatctttagttattttgtctgaaaaagcacatggacaaccattcgcttgagcttcaactgctgtaagaggaaatccttcaaatatagaaggcaaaacaaagcaatccatagcactataataatattcagatttaacattttcaagcattataactttttcatttatatttatttcatttattttagatactatttcttcttttaattctccaaaacctattatcattaatttagcattactattctttatttttgcaaaacattcaatcagaaaagactggtttttttgcacatttaatcttcctacattgccaaaaattatatctttttctccaatattcagttctttccttatttgttttcgattttcagcagaatatgaaaatttttttaaatcaattccattttttactactgtaaactttctatttccataagcaaattctccagcttcttctgaacatgccaagaattcatttgcatatttcgaagcattaagaatcataaaacgttttattactccttttaaagatttttctgttttgctattatgtgaatgatttattaaaattttgcagccattttgtttggcatattttaaggttagtcttgatgtacttaacatgtgtgaatgaactacatcaaaatgattttttttaaaaaaaccttttaaaaattttatatatttaaaaatatttttatactctctaaatgaacatttatgtattgtacagccaattttctgtatttcttcatcaaaataataatttccagtataatgatataaaaaatgaatttcatatttttgcatatctaaatttcttataatattcataattaaattttcaagaccaccctgttgcatatttggaacaatttcgagtatctttattttattcatttttttcttccccttcttagcatttttctataaacaaaatctctcataaaattaggcatataacatacaattgcgtgtggtacaattgatttcaaatattcaaatttagtaaaataaccattttctaattgttctttcttaaatttcttaatgcttttaaaatatttgtgtccaccacgtcttttataaaaatcttcaccaattctcatatatacatatatatcttgaatattataacatttacaaccatttctaatcattcttagccacatatcataatcttcgcacaagtaatattctctataatttccagcatttacaacttcacttttcttaaacataacagatggatgtctaaaaggattcctactttttgaaaatttaataatatcctcattcgtttctggtaatataacattacaaacaacattatctattgaatcaataaattcagatacacttgttccgaccattccaatatctgaatatttctcaaatatttcaaattccttttcaattctttttggcatagaatagtcatctgagtccattctggcaatatactcatttgagcattcttcaactccctttttcaatgcaggacctaagccaacatttttttctatagcaacaactttaaactcttttggatattttgttttatatttttcaacaacgtcatatagttccttggttagtggaccatcctccactaaaacgaactcatttggtttaatagtttgttcaaacatgctttttatactttcatcaaaccatgtaggattttctttatgataaacagacattaaaacgctatactttttttccacaagattcacttctccttaaaaaatcatttcactatacaatgcaatgataaatactcaaactgactactattgtataatctatactatatttttataacccgaattgctagttaatttcattggaaaataaataagtcgtgctatcctaatcttaaacctaagcattagaaagcgcacgacttatatgacttataatagcacacttccaaaagtttttgtttatttactgacaaccattgagacgctttatcaaacgagtgttccccttgaggttcaaaaccgaaagaacgtccatctcgcaacatcaggttgcttagttatcgcttgttacctatggggcgtactgcattttagtgaaacacttaaagctaagcaccaattggctcaaagtttatttcctaatttcctagaatattctcgctttgtccgccgttgtaatgccctcttaccgagtatccaagtcattcgccaagcactcgtctttaaagaggttgaaggaatgagtgtatccattattgacagcttccccattcctttgtgtcagcctattcgtaatttcagaagcaaagttcttggagattatgcaaatgttggctacaatgctacaaagggacagtacttttatggatgtaaatgtcatgctttagtcagtgaatcaggctatgtcatagactacacaattactcctgcttcaatggctgatagttcaatgaccgaggaagtgttgagtcaatttgggacaccaacagtccttggagatatgggatatctaggtcagtcactgcatgataggctggaattaaaaggaattgatctaatgacacctgtcaggaagaacatgaagcaaaagaaaatccttttccctaatttttcaaaacgtagaaaagtgattgagcgagttttctcttttttgacaaatctaggagctgagcgttgtaaaagtcgttcgcctcaagtttttcaattgaaattagagatgatacttttagcgtattctttactgttaaaatcagctaaatcactggaaccagagactttaagatattctatcgggtatcaagtcatggctaaataatcaactagcaattcgggttttgaatagtaagcagtaaataactgactgtattgcttctaaccgattaagtggcacggtttagaaccgaaaagacatattgtcctgtgctacaatcaagtcgaccaaaacaaattgaaggtgagcgtcaaatatgcccaataccattgactcaccgttattttcaataaggcaggtacctaaatccatacctctatttatgcataataaactttagcttattaattatttctgcctttaaaaatattaataaaacaacataaataattatgcccacagtaatttccaacagaatgaatatccaagatgtcggtgttaacaaactaattttaaagacaattagaaacatcactaatcctgcaattaaatacttagataaatccgaaaacagtgtatgcaaattaagctgtttatgaattataaaaagttgatacacagttacagacatttcagaaattacagttgcaattgatgcaccaacagtacctagatatataatcagtggaatatttaacattaaattgactatcgatccaatgatcaccgacactgtatatgacttattttgattagttggtaaaagatattgagtacctattgcgttgctccaagctataaaaataattgcgattgactcgatcattaacacaggaataacatcactaaattgagatgtaaaaaaaagtggcacgaatttaggagtaatagctatcagaccaaacatcataggaatcgaaattgccgacacaaaagaaaaacctgcgtacatgtattccttaattttactatactctctatgtgcaaaggcatttgcaacacgtggcaacatgacagtacctgttgcagtagcaatagccaaaaccagtttaactattttatcagactgatcaaaaaagccggagctcgtgacagaatccaatgaacctaacattgttttattcaaaacccaataaatttggacagcaatttgtgggataaacataactaaagattgctttaaatgctttattggccttaattcacgatagttaacctttacgagatatctgtgtaaacttgggaaaaaagttaaattaccaattaatgtagataaaactgttatcaatatatatatattcaaatcattgtaagatttgacaaataggaaaatactgaatagagcaagtaacttaactataaaatttcttaatacagttactttaaaattttcaattcccataaaaaaccaagagatatcaaatgcagctgcaactatagcaatggattgagacaaatagtatgcatgatactgaccattaatgattaaaaaagcaacgaacaaaaaatatgctaaacatattgtaaatagtcttaaaataaatatttcataaaagactttagacattttgacctgattatccctaacaaaggcaatctgacgattcccatacaaaccgactcctatactaccaaataaaacaaaatactgaacaatagaattggtatatgagttaattccaatacctgaagggcccaaaattcttgacaaataaggaatggtaagtaatggcacaattattacaaagacctgatatattgcattataaagataattttttgcgatttgcat

SEQ ID NO: 258 - protein, 105 aa, Lactococcus lactis; identical to SEQ ID NO: 200
  33142_epsR

SEQ ID NO: 259 - protein, 237 aa, Lactococcus lactis
  33142_epsX
LEVFYSYNSRINNLSKADKGKEVVKNSSEKNQIDLTYKKYYKNLPKSVQNKIDDISSKNKEVTLTCIWQSDSVISEQFQQNLQKYYGNKFWNIKNITYNGETSEQLLAEKVQNQVLATNPDVVLYEAPLFNDNQNIEATSSWTSNEQLITNLASTGAEVIVQPSPPIYGGVVYPVQEEQFKQSLSTKYPYIDYWASYPDKNSDEMKGLFSDDGVYRTLNASGNKVWLDYITKYFTAN

SEQ ID NO: 260 - protein, 259 aa, Lactococcus lactis
  33142_epsC
MQEKQEQTIDLRGIFKIIRKRLGLILFSALIVTILGSIYTFFIASPVYTASTQLVVKLPNSDNSAAYAGQVTGNIQMANTINQVIVSPVILDKVQSNLNLSDDSFKKQVTAANQTDSQVITLTVKYSNPYIAQKIADETAKIFSSDAAKLLNVTNVNILSKAKAQTTPISPKPKLYLAISVIAGLVLGLAIALLKELFDNKINKEEDIEALGLTVLGVTTYAQMSDFNKNTNKNGTQSGTKSSPPSDHEVNRSSKRNKR

SEQ ID NO: 261 - protein, 231 aa, Lactococcus lactis
  33142_epsD
MAKNKRSIDNNRYIITSVNPQSPISEQYRTIRTTIDFKMADQGIKSFLVTSSEAAAGKSTESANIAVAFAQQGKKVLLIDGDLRKPTVNITFKVQNRVGLTNILMHQSSIEDSIQGTRLSENLTIITSGPIPPNPSELLASSAMKNLIDSVSDFFDVVLIDTPPLSAVTDAQILSSYVGGVVLVARAYETKKESLAKTKKMLEQVNANILGVILHGVDSSDSPSYYYYGVE

SEQ ID NO: 262 - protein, 254 aa, Lactococcus lactis
  33142_epsB
MIDIHCHILPGIDDGAKTSGDTLTMLKSAIDEGITTITATPHHNPQFNNESPLILKKVKEVQNIIDEHQLPIEVLPGQEVRIYGDLLKEFSEGKLLTAAGTSSYILIEFPSNHVPAYAKELFYNIQLEGLQPILVHPERNSGIIENPDILFDFIEQGVLSQITASSVTGHFGKKIQKLSFKMIENHLTHFVASDAHNVTSRAFKMKEAFEIIEDSYGSDVSRMFQNNAESVILNESSHQEKPTKIKTKKFLGLF

SEQ ID NO: 263 - protein, 199 aa, Lactococcus lactis
  33142_epsE1
MEVFEDGSSPEPEEHKLVELKKFSHREIIIKRGIDILGGLVGSGLFLIAAALLYVPYKMSSEKDQGPMFYKQKRYGKNGKIFYILKFRTMILNTEQYLELNPDVKAAYHANGNKLENDPRVTKIGSFIRRHSIDELPQFINVLKGDMALVGPRPILLFEAKEYGKRLPYLLMCKPGITGYWQVPLFSDNGVLQSAKGVA

SEQ ID NO: 264 - protein, 251 aa, Lactococcus lactis
  33142_epsE2
MAPIDSEVIDTKDNSKVLNDVVASESVIVPVNNKVKKSKAILHKIERASYFSIKRIFDIICSLLGIIALIPVAIVTKICYIATGDKKSIFYKQKRIGKNGKPIYIYKFRSMVWNADEVLKELLKDPKYKKEWDLNQKFENDPRITKMGNILRKTSLDELPQFINVIKGDMSMIGPRPLVEGELNAHKGNHAIYESVRPGLSGWWAANGRSATTYERRLELEYFYCKNCNLILDIKCVFLTIAVVLFKTGAK

SEQ ID NO: 265 - protein, 300 aa, Lactococcus lactis
  33142_lytR
MNQKKRRHYRKKKHTVLKVISIIFVLVIIAVASIAYAAYRNVESTFSTSYENFPKTTSIDLKKSKTFTTLIIATGKNNSKNTAYATVLASTNVKTNQTTFMNFPVFATMPNQKTITEVYNTNGDDGIFQMVKDLLNVSINKVIHIDVNKMGSLVQATGGIIMQNTKAFNAEGYEFKQGTVNLQTADQVQAYMTQIDDTDLDASITRIQNVSMELYGNIQKIAHMKKLESFNYYREIIYAFSNTVKTNISFNDAKKIVMSYNKALKNTSKLNLHTTDENGAKVVSQTELDSVKTLFEKSLK

SEQ ID NO: 266 - protein, 304 aa, Lactococcus lactis
  33142_epsL
LEEKLERKKKTKNNIWVIIIPILIFITLIGAGAYALRDSLIPTEHTKTNSSDQPTKTSASNGYVEQKGEEAAVGSIALVDDVGVPKWVKVPSEVNLDKFTDLSTNNITIYRINNPEVLKTVTNRTDQRMKMSEVIAKYPNTLIMNASAFDMQTGQVAGFQINNAKLIQDWSPGTMVQYAFVINKDGSCKIYDSSTPASTIIKNGGEQAYDFGTAIIRDGKIQPSDGSVDWKIHIFIANDKDNNLYAILSDTNAGYDNIMKSVSNLKLQNMLLLDSGGSSQLSVNGKTIVASQDDRAVPDYIVMK

SEQ ID NO: 267 - protein, 148 aa, Lactococcus lactis
  33142_nucleotide_sugar_dehydrogenase
LLRILHTIEATGCLPKDTKQLLANYDQVSEKLIEAVVESNRTRKDHIADMIIKRYPKVVGIYRLTMKSNSDNFRSSSIQGIMKRIKGKGIEVVVYEPTLTDDQFYNSRVVHNLDEFKMISDVIVSNRYTKELEDVKTKVYTRDLFGRD

SEQ ID NO: 268 - protein, 315 aa, Lactococcus lactis
  33142_GT1
MKEKVSVIMSIYKESENELKSSIESILNQTYSNLELIIVVDNPDEKWRIDFLKSYKDDRMKIIINEKNIGLPKSLNKALKNATGEYIARMDADDIALPIRFEKQYEFLKETGYDMCGSNVTCFIDNVDFKDIIFPRKAENVKKLLFIKNCVSHPTYFVRKNVYEKLNGYNNVFSCEDYDFLLRAVGNGITIGNVQDILLKYRISPQSISRKNAGKQELIAKYLRKYYKNNPLGEVTETMIKEYLDSNKFKKNLRSYDFYWGMKNTRSKYKENKGIKYYYYTVLLVFNFKHSLKEIYRKLYEMTLSQVFKVTNGEF

SEQ ID NO: 269 - protein, 184 aa, Lactococcus lactis
  33142_acetyltransferase
MISDRKKLMHVLNLEKKAYIENKKDYIKKVLSGNEKIDIWRFQKHLRKAEYYYNQKNKIFFPLYAYHIYRKNCIGKRMGIFASINTIDEGLIIYHSGEIVVSGLAKCGKNLKLHGNNCIGNKGLDGYAPIIGNNCDVGFGAVIIGDVVLGDDIKVGANAVVNKNFKSGVLVGVPAKEIENERKS

SEQ ID NO: 270 - protein, 382 aa, Lactococcus lactis
  33142_wzy
MMKTKEKIFIALCFFAFIQPNFFVKINVLNYMSIGMALLCTLILLLRSFKKNVKFDITIFLLLLWRLLIFIPTLNHNGEIVKWGYQSVVFVGLYLLIKNYICDKDAFRIVYKMIFSYVLINILLMIIYPNGIFPQYGIYFLGIRTRFTEFSIALMYISLIYYNEYSSKNKKDRKKLITSYVLAIINILSKWVATGIVVIVLTILFYLLLRLLRNKKKLSLVYCFGFLILIALSINLINGNLLNLFSGLFELLNKDITLTGRTIIWENAIYVAKNYFLFGFGYVNDGNIISYHNGLWQAHNTILQSMCECGIFGTLTLFMMIFKQGFPNKIDNKKINSLNVAIIFSFLIMMMTEITYYYPIFIFIIFLIGNNYKKLGEIKDDK

SEQ ID NO: 271 - protein, 361 aa, Lactococcus lactis
  33142_GT2
MNKIKILEIVPNMQQGGLENLIMNIIRNLDMQKYEIHFLYHYTGNYYFDEEIQKIGCTIHKCSFREYKNIFKYIKFLKGFFKKNHFDVVHSHMLSTSRLTLKYAKQNGCKILINHSHNSKTEKSLKGVIKRFMILNASKYANEFLACSEEAGEFAYGNRKFTVVKNGIDLKKFSYSAENRKQIRKELNIGEKDIIFGNVGRLNVQKNQSFLIECFAKIKNSNAKLMIIGFGELKEEIVSKINEININEKVIMLENVKSEYYYSAMDCFVLPSIFEGFPLTAVEAQANGCPCAFSDKITKDVKLNNNVKFLDIDNADEWIQFFNNFNMKREERYSEKLLDYDTDKLINVIEKIYSKGAHDEN

SEQ ID NO: 272 - protein, 280 aa, Lactococcus lactis
  33142_GT3
VNLVEKKYSVLMSVYHKENPTWFDESIKSMFEQTIKPNEFVLVEDGPLTKELYDVVEKYKTKYPKEFKVVAIEKNVGLGPALKKGVEECSNEYIARMDSDDYSMPKRIEKEFEIFEKYSDIGMVGTSVSEFIDSIDNVVCNVILPETNEDIIKFSKSRNPFRHPSVMFKKSEVVNAGNYREYYLCEDYDMWLRMIRNGCKCYNIQDIYVYMRIGEDFYKRRGGHKYFKSIKKFKKEQLENGYFTKFEYLKSIVPHAIVCYMPNFMRDFVYRKMLRRGRKK

SEQ ID NO: 273 - protein, 471 aa, Lactococcus lactis
  33142_wzx
MQIAKNYLYNAIYQVFVIIVPLLTIPYLSRILGPSGIGINSYTNSIVQYFVLFGSIGVGLYGNRQIAFVRDNQVKMSKVFYEIFILRLFTICLAYFLFVAFLIINGQYHAYYLSQSIAIVAAAFDISWFFMGIENFKVTVLRNFIVKLLALFSIFLFVKSYNDLNIYILITVLSTLIGNLTFFPSLHRYLVKVNYRELRPIKHLKQSLVMFIPQIAVQIYWVLNKTMLGSLDSVTSSGFFDQSDKIVKLVLAIATATGTVMLPRVANAFAHREYSKIKEYMYAGFSFVSAISIPMMFGLIAITPKFVPLFFTSQFSDVIPVLMIESIAIIFIAWSNAIGTQYLLPTNQNKSYTVSVIIGSIVNLMLNIPLIIYLGTVGASIATVISEMSVTVYQLFIIHKQLNLHTLFSDLSKYLIAGLVMFLIVFKISLLTPTSWIFILLEITVGIIIYVVLLIFLKAEIINKLKFIMHK

SEQ ID NO: 274 - DNA, 16476 bp, Lactococcus lactis
  DSM 33183 eps gene cluster, complete sequence
atgaataatttattttaccatcgtctaaaggaactagttgaatcaagtggtaaatctgcaaatcaaatagaaagggaattgggttaccctagaaattctttgaataattataagttgggaggagaaccctctgggacaagattaataggactatcagagtattttaatgtgtctccaaaatatctgatgggtataattgatgagcctaatgacagttctgcaattaatctttttaaaactctaactcaagaagagaaaaaagaaatgtttataatttgtcaaaaatggctttttttagaatatcaaatagagttataacaataataaatttagggagttttttcggtagtgtaaaataagttttggaacatcaaaaatatcacctacaatggcgaaacaagtgaacaattattggctgaaaaagttcaaaatcaagtattggcgactaaccctgatgttgttttatatgaagctccactttttaatgataaccaatatagactactgggctagttacccagacaaaaattctgatgaaatgaagggggctgttttctgatgatggagtatatagaacattaaatgcttcggggaataaggtttggctagattatattactaaatattttacagcaaactaattaagttataaataacaattattaaatattggagaagaaatgcaggaaacacaggaacagacgattgatttaagagggatttttaaaattattcgcaaaaggttaggtttaatattatttagtgctttaatagtcacaatattagggagcatctacacattttttatagcctccccagtttacacagcctcaactcaacttgtcgttaaactatcaaattcggataattcagcagcctacgctggacaagtgaccgggaatattcaaatggtgaacacaattaaccaagttattgttagtccagtcattttagataaagttcaaagtaatttaaatctatctgatgactctttccaaaaacaagttacagcagcaaatcaaacagattcacaagttattacgcttactgttaaatattctaatccttacattgcacaaaagattgcagacgagactgctaaaatatttagttcagacgcagcgaaactattgaatgttactaacgttaatattctatccaaagcaaaagctcaaacaacaccaattagtcctaaacctaaattgtatttagcgatatctgttatagtcggactagttttaggtttagccattgctttattgaaggaattgtttgataacaaaattaataaagaagaagatattgaagctctggggctcacggttcttggtgtaacaacctatgatcaaatgagtgattttaataagaatacaaataaaaatggcacgcaatcgggaactaagtcaagtccgcctagcgaccatgaagtaaatagatcatcaaaaaggaataaaagataggagttcaggatggctaaaaataaaagaagcatagacaacaatcattatattattaccagtgtcaatcctcaatcacctatttccgaacaatatcgtacgattcgtacgacccttgattttaaaatggcggatcaaggaattaaaagttttctagtagcatcttcagaagcagctgtaggtaaatcaaccgtaagtgctaatatagctgttgcttttgcacaacaaggtaaaaaagtacttttaattgatggcgatcttcgtaaaccgactgttaacattacttttaaagtacaaaatagagtaggattaaccaatattttaatgcatcaatcttcgattgaagatgccatacaagggacaagactttctgaaaatcttacaataattacctctggtccaattccacctaatccatcggaattattagcatctagtgcaatgaagaatttgattgactctgtgtccgatttatttgatgttgttttgattgatactccacctctctctgcagttactgatgctcaaattttgagtagttatgtaggaggagcagttattgttgtacatgcctatgaaacaaaaaaagagagtttagcaaaaacaaaaaaaatgcttgaacaagttaatacaaatattttaggggttgttttgcatggggtaaactcttctgagtcaccatcgtattactaccacggagtagagtaattggaataaacttgaatcaaataaaagacagaaatttgtagaagaggagagcaaatgattgatattcattgccatattttaccgggtatagatgatggagctaaaacttctggagatactttgacaatgctgaaatcagcaattgatgaagggataacaaccatcactgccactcctcatcataatcctcaatttaataatgaatcaccgcttattttgaagaaagttaaggaagttcaaaatatcattgacgagcatcaattaccaattgaagttttaccaggacaagaggtgagaatatatggtgatttattaaaagaattttctgaaggaaagttactgacagcagcgggcacttcaagttatatattgattgaatttccatcaaatcatgtgccagcttatgctaaagaacttttttataatattcaattggagggacttcaacctattttggtccaccctgagcgtaatagcggaatcattgagaaccctgatatattatttgattttattgaacaaggagtactaagtcagataacagcttcaagtgtcactggtcattttggtaaaaaaatacaaaagctgtcatttaaaatgatagaaaaccatcttacgcattttgttgcatcagatgcgcataatgtgacgtcacgtgcatttaagatgaaggaagcgtttgaaattattgaagatagttatggttctgatgtatcacgaatgtttcaaaataatgcagagtcagtgattttaaacgaaagtttttatcaagaaaaaccaacaaagatcaaaacaaagaaatttttaggattaaatggagtaaataatggaattttttgaggatgcctcatcacctgaatcggaagagcctaagttagtagaattaaaaaatttttcttatagagagctaattataaaaagagcaattgatatcctaggaggattagcaggttcagttttatttcttattgcggctgcattgctctatgtcccttacaaaatgagctcggaaaaagatcaagggccaatgttctataaacaaaaacgctatgggaagaatggtaaaattttttatattttgaaatttagaacaatgattcttaataccgagcagtatctagaacttaatccggatgttaaagctgcttaccatgccaacggcaataagctagaaaacgatccacgggtaacgaagattggatcatttataagacgacactcaattgatgaactgccacaatttatcaatgttcttaaaggggatatggcattagttggtccaagaccaattctgctttttgaagcgaaagaatatgggaaacgcctcccttacttactcatgtgcaaaccaggaatcactggttattggcaagttcctctattttcagataatggagtacttcaatcagcaaagggggtggcatgaatggctacaatagattcagaagatatagacactaaagataattctaaagttttaaatgatgttgttgcgagtgaatctgttatagtaccagttaacaacaaagtaaaaaaatcaaaagcaattttgcataaaattgaaagagcttcatattttagcattaaaagaatcttcgacataatttgctcattgcttggcattatagcattaattccagtagcaatagtaactaaaatatgttacatagcaacaggagataaaaaatcaatattttataaacaaaagagaatcggaaaaaatggtaaaccgatatatatatataaatttagaagtatggtatggaatgcagatgaagtgttaaaagaacttttaaaagaccctaagtataaaaaagaatgggacttaaatcaaaaatttgaaaatgatccgagaataacaaaaatgggaaatattttaagaaaaacatcattagatgaattgccacaattcatcaatgtaattaaaggtgatatgtctatgataggacctcgacctttagttgaaggagagcttgatgctcataaaggaaatcatgcaatatatgaaagtgttcgcccaggcatctcggggtggtgggccgcgaacggaaggtcagctactacttatgaaagaagacttgaattagaatatttctattgtaaaaattgtaatttaatattagatattaagtgtgtattcttaacaatagcagtagtgttatttaaaacaggagcaaagtagtatcaaactataatgaacccgaattgctagttgattatttagccatgacttgatacccgatagaatatcttaaagtctctggttccagtgatttagctgattttaacagtaaagaatacgctaaaagtatcatctctaatttcaattgaaaaccttgaggcgaacgacttttacaacgctcagctcctagatttgtcaaaaaagagaaaactcgctcaatcacttttctacgttttgaaaaattagggaaaaggattttcttttgcttcatgttcttcctgacaggtgtcattagatcaattccttttaattccagcctatcatgcagtgactgacctaaatatcccatatctccaaggactgttggtgtcccaaattgactcaacacttcctcggtcattgaactatcagccattgaagcaggagtaattgtgtagtctatgacatagcctgattcactgactaaagcatgacatttacatccatagaagtactgtccctttgtagcattgtagccaacatttgcataatctccaagacctttgcttctgaaattacgaataggctgacacaaaggaatggggaagctgtcaataatggatacactcattccttcaacctctttaaagacgagtgcttggcgaatgacttggatactcggtaagagggcattacaacggcggacaaagcgagaatattctaggaaattaggaaataaactttgagcaagttggtgcttagctttaagcgtttcactaaaatgcagtacgccccagaggtaacaagcgataactaagcaatctgatgttgcgagatggacgttctttcggttttgaacctcaaggggaaccctcgtttgataaagcgtctcaatggttgtcagtaaataaacaaaaacttttggaagtgtgctattataagtcatataagtcgtgagctttctaatgcttagtgctttaagattaggatagcacgacttatttattttccaatgaaattaactagcaattcgggtaatatatatatggaggtaccatgaatcaaaaaaagaggcgtcattatcgtaagaaaaaacacacagtactaaaagttatttcaattatttttgtattagtaattatcgctgttgcttctatagcctacgccgcttatagaaatgttgaatcaacattttcaacatcgtatgaaaatttccctaaaacaacaagtatcgacttaaaaaagtctaaaacattcaccacacttatcattgcaactggtaaaaataattctaaaaatacagcttatgctactgttttagcttcaacgaatgtaaagacaaatcaaactactttcatgaacttcccagtttttgcgacaatgcctaatcaaaaaacaatcactgaagtttacaatacgaatggagatgatggaattttccagatggttaaagacctattgaatgtgtccattaacaaagtaattcatattgatgttaataaaatgggatcacttgtacaggccactggtggaatcatcatgcaaaatccaaaggcattcaatgctgaagattatgagtttaaacaaggaactgttaatttacaaactgctgatcaagtccaagcctatatgacacaaattgacgatactgatttggatgcttcaatcacccggattcaaaatgtctcaatggaactctacggaaatattcaaaaaattgctcatatgaaaaaacttgaaagtttcaattactatcgagaaattctctatgctttttcaaacactgttaaaaccaatataagtttcaatgatgctaaaaagatcgttatgagctacaatgaggctctaaagaataccagcaagctcaatctacatacaacagatgaaaatggagctaaggtcgtttctcaaacagaattagactcagtcaaaaccctttttgaaaaatctctaaaataaaagaaccaagaggttcttttatttttatttcatcacaatataatccggtacggctcgatcgtcttgactagcaacaatagttttaccattgacagatagttgacttgagccgccactatcaagtaataacatattttggagcttcaaatttgacactgatttcattatattatcataacctgcatttgtatcactcaaaatagcatagagattattatctttatcattcgcaataaaaatatggatcttccagtctactgagccatcacttggctgaatcttaccatcacggataattgcagtaccaaaatcataggcctgttcccccccatttttaataatagttgaagcaggtgtacttgaatcatagattttgcatgaaccatctttgttaataacaaaggcatattgaaccattgtacctggactccagtcttgaatcaactttgcattgttgatttggaagccagctacttgtcctgtctgcatatcaaatgccgaggcattcataatcaaggtattagggtatttagctataacttcggacattttcattcgttgatctgtacgattggtaactgtttttaggacttctggattattaattcgataaatagtgatattattcgtagataaatcagtaaatttatctagatttacctctgagggaaccttaacccattttggtacaccaacatcatctacaagtgctatactacccacagcagcttcttcacctttttgctccacgtaaccgttagaagccgaagttttggtcggttgatccgaactatttgttttcgtatgttcagtaggaataagtgaatctcttaaggcataagcccctgctcctataagggtaataaaaattaagataggtataattatcacccagatattatttttcgtctttttttttcgttccaatttctcctccaaaattgttgtttagtcacgaccaaataaatctctcgtgtaaactttggttttaacatcctcaagttctttagtataacgatttgaaacaataacatcagaaatcattttaaactcatctagattatgaactacccgagaattgtagaactgatcatctgtgagtgtcggctcatagacaactacttcaattcccttgcctttaattcgtttcataattccttgaattgaacttgatctaaaattatcagaatttgacttcattgtcaagcggtagatgcccaccactttgggataccgtttaatgatcatatctgcgatatgatcttttctcgtcctatttgattcaacaacagcctcaattaatttctcagaaacttggtcatagttagccaaaagctgtttggtatctttcggtaagcaacctgtcgcttctattgtgtgtaatattcttaacaaaaaccaaaagaaaacctgtatttatgcaggttttaagtaactttttttttcttaacatattctagtaaattttgataaatatcttgatatttaaaaacaatctcgactcttttatcttcaaaaatatatatgcattctataaatttaaaaagtatatctctatcaattttcttaaataattctctattgttaaaaagttttattaaatcaacttgataatttggaatattatctaattcttccaattccttatcaattattttaattgtttctctaatttctaaaatttcattattatatgaacttgaataatttttataatcttcgaaagttattatttcttctttccaatctgtatataaagattgttttgatgttatccttaaatcttagagtcactattgtataatttagacaaaggacaaaaacatgaaaaaatgctactcaaaagaatttaaagaaacccttatcgccttctatcattctggtcaatccgtcacccagctgtctaaagaatacgacgtggcccctgcaacaatttataaatggatagacctctactctaaatctaatgaaagctccgtctctaaagctgattttctagaattaaaaagacaactggctaaagttaaggaagaacgagacatcttaaaaaaagtattgaccatattcgccgagaaaaagaagtgagtgctgcggatatggctcaaaccatacaaactttagcactcaatgtcagactaagctgtcaactccttgatattcctgaatcaagttattatgaacggattaaccgacatccatctaaaactcaattaaggagacaatacctgtcactcaaaatttctcaactcttcaatgctaaccgagaaatctatggtgttcctaaaattcatcatcttctacttaaacaaggggaaaaagtcgggttaaaactggtacagaagctaatgaagcaacttcaactcaagtctgtagtcattaagaaatttaagcctggatactcactaagtgatcacatcaatcgaaaaaatctcatacagactgaacctacaaagaaaaataaggtttggtcaaccgacattacttatattcctactcaacaaggatgggcttatctctcaaccattatggatcgttatactaaaaaagtcattgcttgggatttgggcaagcgaatgactgtagaattagtgcaaagaactttaaataaggccattaaatcacaagactatccagaagctgttattcttcattctgaccaaggaagccagtatacgagtctagagtatgaagagttgcttaagtattatgggatgactcactctttcagtcgaaggggatacccttatcataatgccagtcttgaatcttggcatggacatttaaaaagagagtgggtgtatcaatttaaatataagaactttgaagaagcctatcagagtattttctggtacatcgaaggcttttataattcaaaacgaatccatcaaagtttagggtatcttacacctaatcaatttgaaaaggtaagtgcttaaaataaatagattaaaattctccgtttgttactttaaaaacttgacttaacgtcatttcataaagttttctataaatttcttttaaagaatgtttaaagttaaaaacaagtaaaacagtataataataatactttattcctttattttccttgtactttgatctggtatttttcattccccaataaaaatcgtaacttcttaaattttttttgaatttatttgagtctaagtattctttaatcattgtttctgttacttctcctaatgggttatttttataatattttcttaaatactttgcaatcaattcttgctttcctgcattttttcttgatatactttgtggactaattctatacttcaataatatatcttgaacatttccgatagttataccatttccaactgccctcaataaaaaatcataatcttcacaagaaaaaacattattatatccatttagtttttcataaacattctttctaacaaaataagtaggatgtgatacacaattttttataaaaagtagtttttttacattctctgcttttcttggaaaaatgatatctttgaaatctacattatcaataaaacatgtaacatttgatccacacatgtcatagcctgtttcttttaaaaattcatattgtttttcaaaacgtatcggaagagctatatcatctgcatccatcctagctatatattctccagttgcattttttaatgctttattcaaacttttaggaagacctatatttttttcattaatgataattttcattctatcatctttatatgattttaaaaagtcaattctccacttttcatctggattatccacaactataataagttctaaattagaataagtttgattaagtatagattcaattgatgatttaagttcattttcactttctttatatattgacattataacactaactttttctttcattttctatctcctttgctggtacaccaactaatactccacttttaaagtttttatttactacagcattcgcgccaacttttatatcatcgcctaaaacaacatcacctataattactgccccaaagcctacatcacaattatttcctattattggtgcatatccgtctaatcctttatttcctatacaattattaccatgtagtttaaggttcttcccacatttagccaaaccactaactacaatttctccagaatgataaattattagcccttcatcaattgtattaatacttgcgaaaatacccattcttttacctatacaattttttctgtaaatatggtatgcatataatggaaaaaagattttatttttttgattataataatattcggcttttcttaaatgcttttgaaatctccatatatctatcttttcatttcctgacaaaactttttttatataatctttcttattttcaatatacgcttttttttcaagattcaaaacatgcattaatttttttctatcacttatcatctttaatttctcctaactttttataattatttcctattaaaaaaattataaaaataaatattggataataatatgttatttctgtcatcatcattattaaaaagctaaaaataattgcaacatttaatgaatttatttttttattatcgattttatttggaaatccttgtttaaaaatcatcataaacaatgttaaagttccaaatataccagactcacacatagattgtaaaatagtattatgtgcttgccataatccattatgatagctaataatatttccgtcattaacatatccaaatccaaataaaaaataattttttgccacataaattgcattttcccatattatagttctacccgtcaacgtaatatctttgtttaataattcaaaaaggccactaaatagatttaacaaatttccatttattaaattaatggacaaagcaattaaaattaaaaatccaaaacaataaactaaacttagtttctttttatttctcaataataaataaaacaaaatagttaacacaataacaacaatacctgtggcaacccatttagataatatatttataattgctaatacatacgatgtaattagtttttttcgatcttttttattctttgaagaatactcgttgtaataaattaaagaaatgtacataagagcgattgaaaattccgtaaaacgagttcttattcctaaaaaataaataccatactgtggaaatattccattaggataaataatcattaataaaatattaattagaacataactaaaaatcattttgtatacaattctaaatgcatccttatcgcaaatataattttttattaataaatacaagccaacaaatacaaccgattgatagccccatttaacaatttcaccattatgattcaatgttggtataaatatcagaagtctccataatagtaaaaggaaaatggtaatatcaaatttaacattttttttaaatgaccttaataataaaattaacgtacataataaggccattccaatactcatataattaagcacattgatttttacaaaaaaattaggctgaataaatgcaaaaaaacaaagtgcaatgaaaattttttctttagttttcatcatgagcccccttagaatatattttttctattacatttattaatttatctgtatcataatctaatagtttttctgaataacgttcttctcttttcatattaaaattattgaaaaattgtatccattcgtcagcgttgtcaatatccaagaatttaacattgttatttaattttacatctttagttattttgtctgaaaaagcacatggacaaccattcgcttgagcttcaactgctgtaagaggaaatccttcaaatatagaaggcaaaacaaagcaatccatagcactataataatattcagatttaacattttcaagcattataactttttcatttatatttatttcatttattttagatactatttcttcttttaattctccaaaacctattatcattaatttagcattactattctttatttttgcaaaacattcaatcagaaaagactggtttttttgcacatttaatcttcctacattgccaaaaattatatctttttctccaatattcagttctttccttatttgttttcgattttcagcagaatatgaaaatttttttaaatcaattccattttttactactgtaaactttctatttccataagcaaattctccagcttcttctgaacatgccaagaattcatttgcatatttcgaagcattaagaatcataaaacgttttattactccttttaaagatttttctgttttgctattatgtgaatgatttattaaaattttgcagccattttgtttggcatattttaaggttagtcttgatgtacttaacatgtgtgaatgaactacatcaaaatgattttttttaaaaaaaccttttaaaaattttatatatttaaaaatatttttatactctctaaatgaacatttatgtattgtacagccaattttctgtatttcttcatcaaaataataatttccagtataatgatataaaaaatgaatttcatatttttgcatatctaaatttcttataatattcataattaaattttcaagaccaccctgttgcatatttggaacaatttcgagtatctttattttattcatttttttcttccccttcttagcatttttctataaacaaaatctctcataaaattaggcatataacatacaattgcgtgtggtacaattgatttcaaatattcaaatttagtaaaataaccattttctaattgttctttcttaaatttcttaatgcttttaaaatatttgtgtccaccacgtcttttataaaaatcttcaccaattctcatatatacatatatatcttgaatattataatatttacaaccatttctaatcattcttagccacatatcataatcttcgcacaagtaatattctctataatttccagcttttacaacttcacttttcttaaacataacagatggatgtctaaaaggattcctactttttgaaaatttaataatatcctcattcgtttctggtaatataacattacaaacaacattatctattgaatcaataaattcagatatacttgttccgaccattccaatatctgaatatttctcaaatatttcaaattccttttcaattctttttggcatagaatagtcatctgagtccattctggcaatatactcatttgagcattcttcaactccctttttcaatgcaggacctaagccaacatttttttctatagcaacaactttaaactcttttggatattttgttttatatttttcaacaacgtcatatagttccttggttagtggaccatcctccactaaaacgaactcatttggtttaatagtttgttcaaacatgctttttatactttcatcaaaccatgtaggattttctttatgataaacagacattaaaacgctatactttttttccacaagattcacttctccttaaaaaatcatttcactatacaatgcaatgataaatactcaaactgactactattgtataatctatactatatttttataacccgaattgctagttaatttcattggaaaataaataagtcgtgctatcctaatcttaaaccactaagcattagaaagcgcacgacttatatgacttataatagcacacttccaaaagtttttgtttatttactgacaaccattgagacgctttatcaaacgagggttccccttgaggttcaaaaccgaaagaacgtccatctcgcaacatcagattgcttagttatcgcttgttacctatggggcgtactgcattttagtgaaacgcttaaagctaagcaccaacttgctcaaagtttatttcctaatttcctagaatattctcgctttgtccgccgttgtaatgccctcttaccgagtatccaagtcattcgccaagcactcgtctttaaagaggttgaaggaatgagtgtatccattattgacagcttccccattcctttgtgtcagcctattcgtaatttcagaagcaaaggtcttggagattatgcaaatgttggctacaatgctacaaagggacagtacttctatggatgtaaatgtcatgctttagtcagtgaatcaggctatgtcatagactacacaattactcctgcttcaatggctgatagttcaatgaccgaggaagtgttgagtcaatttgggacaccaacagtccttggagatatgggatatttaggtcagtcactgcatgataggctggaattaaaaggaattgatctaatgacacctgtcaggaagaacatgaagcaaaagaaaatccttttccctaatttttcaaaacgtagaaaagtgattgagcgagttttctcttttttgacaaatctaggagctgagcgttgtaaaagtcgttcgcctcaaggttttcaattgaaattagagatgatacttttagcgtattctttactgttaaaatcagctaaatcactggaaccagagactttaagatattctatcgggtatcaagtcatggctaaataatcaactagaaattcgggttttgaatagtaagcagtaaataactgactgtattgcttctaaccgattaagtggcacggtttagaaccgaaaagacatattgtcctgtgctacaatcaagtcgaccaaaacaaattgaaggtgagcgtcaaatatgcccaataccattgactcaccgttattttcaataaggcaggtacctaaatccatacctctatttatgcataataaactttagcttattaattatttctgcctttaaaaatattaataaaacaacataaataattatgcccacagtaatttccaacagaatgaatatccaagatgtcggtgttaacaaactaattttaaagacaattagaaacatcactaatcctgcaattaaatacttagataaatccgaaaacagtgtatgcaaattaagctgtttatgaattataaaaagttgatacacagttacagacatttcagaaattacagttgcaattgatgcaccaacagtacctagatatataatcagtggaatatttaacattaaattgactatcgatccaatgatcaccgacactgtatatgacttattttgattagttggtaaaagatattgagtacctattgcgttgctccaagctataaaaataattgcgattgactcgatcattaacacaggaataacatcactaaattgagatgtaaaaaaaagtggcacgaatttaggagtaatagctatcagaccaaacatcataggaatcgaaattgccgacacaaaagaaaaacctgcgtacatgtattccttaattttactatactctctatgtgcaaaggcatttgcaacacgtggcaacatgacagtacctgttgcagtagcaatagccaaaaccagtttaactattttatcagactgatcaaaaaagccggagctcgtgacagaatccaatgaacctaacattgttttattcaaaacccaataaatttggacagcaatttgtgggataaacataactaaagattgctttaaatgctttattggccttaattcacgatagttaacctttacgagatatctgtgtaaacttgggaaaaaagttaaattaccaattaatgtagataaaactgttatcaatatatatatattcaaatcattgtaagatttgacaaataggaaaatactgaatagagcaagtaacttaactataaaatttcttaatacagttactttaaaattttcaattcccataaaaaaccaagagatatcaaatgcagctgcaactatagcaatggattgagacaaatagtatgcatgatactgaccattaatgattaaaaaagcaacgaacaaaaaatatgctaaacatattgtaaatagtcttaaaataaatatttcataaaagactttagacattttgacctgattatccctaacaaaggcaatctgacgattcccatacaaaccgactcctatactaccaaataaaacaaaatactgaacaatagaattggtatatgagttaattccaatacctgaagggcccaaaattcttgacaaataaggaatggtaagtaatggcacaattattataaagacctgatatattgcattataaagataattttttgcgatttgcattaataaccctcccgaattaaacaa

SEQ ID NO: 275 - protein, 105 aa, Lactococcus lactis
  33183_epsR
MNNLFYHRLKELVESSGKSANQIERELGYPRNSLNNYKLGGEPSGTRLIGLSEYFNVSPKYLMGIIDEPNDSSAINLFKTLTQEEKKEMFIICQKWLFLEYQIEL

SEQ ID NO: 276 - protein, 259 aa, Lactococcus lactis
  33183_epsC
MQETQEQTIDLRGIFKIIRKRLGLILFSALIVTILGSIYTFFIASPVYTASTQLVVKLSNSDNSAAYAGQVTGNIQMVNTINQVIVSPVILDKVQSNLNLSDDSFQKQVTAANQTDSQVITLTVKYSNPYIAQKIADETAKIFSSDAAKLLNVTNVNILSKAKAQTTPISPKPKLYLAISVIVGLVLGLAIALLKELFDNKINKEEDIEALGLTVLGVTTYDQMSDFNKNTNKNGTQSGTKSSPPSDHEVNRSSKRNKR

SEQ ID NO: 277 - protein, 231 aa, Lactococcus lactis
  33183_epsD
MAKNKRSIDNNHYIITSVNPQSPISEQYRTIRTTLDFKMADQGIKSFLVASSEAAVGKSTVSANIAVAFAQQGKKVLLIDGDLRKPTVNITFKVQNRVGLTNILMHQSSIEDAIQGTRLSENLTIITSGPIPPNPSELLASSAMKNLIDSVSDLFDVVLIDTPPLSAVTDAQILSSYVGGAVIVVHAYETKKESLAKTKKMLEQVNTNILGVVLHGVNSSESPSYYYHGVE

SEQ ID NO: 278 - protein, 261 aa, Lactococcus lactis
  33183_epsB
MIDIHCHILPGIDDGAKTSGDTLTMLKSAIDEGITTITATPHHNPQFNNESPLILKKVKEVQNIIDEHQLPIEVLPGQEVRIYGDLLKEFSEGKLLTAAGTSSYILIEFPSNHVPAYAKELFYNIQLEGLQPILVHPERNSGIIENPDILFDFIEQGVLSQITASSVTGHFGKKIQKLSFKMIENHLTHFVASDAHNVTSRAFKMKEAFEIIEDSYGSDVSRMFQNNAESVILNESFYQEKPTKIKTKKFLGLNGVNNGIF

SEQ ID NO: 279 - protein, 199 aa, Lactococcus lactis
  33183_epsE1
MEFFEDASSPESEEPKLVELKNFSYRELIIKRAIDILGGLAGSVLFLIAAALLYVPYKMSSEKDQGPMFYKQKRYGKNGKIFYILKFRTMILNTEQYLELNPDVKAAYHANGNKLENDPRVTKIGSFIRRHSIDELPQFINVLKGDMALVGPRPILLFEAKEYGKRLPYLLMCKPGITGYWQVPLFSDNGVLQSAKGVA

SEQ ID NO: 280 - protein, 251 aa, Lactococcus lactis
  33183_epsE2
MATIDSEDIDTKDNSKVLNDVVASESVIVPVNNKVKKSKAILHKIERASYFSIKRIFDIICSLLGIIALIPVAIVTKICYIATGDKKSIFYKQKRIGKNGKPIYIYKFRSMVWNADEVLKELLKDPKYKKEWDLNQKFENDPRITKMGNILRKTSLDELPQFINVIKGDMSMIGPRPLVEGELDAHKGNHAIYESVRPGISGWWAANGRSATTYERRLELEYFYCKNCNLILDIKCVFLTIAVVLFKTGAK

SEQ ID NO: 281 - protein, 300 aa, Lactococcus lactis
  33183_lytR
MNQKKRRHYRKKKHTVLKVISIIFVLVIIAVASIAYAAYRNVESTFSTSYENFPKTTSIDLKKSKTFTTLIIATGKNNSKNTAYATVLASTNVKTNQTTFMNFPVFATMPNQKTITEVYNTNGDDGIFQMVKDLLNVSINKVIHIDVNKMGSLVQATGGIIMQNPKAFNAEDYEFKQGTVNLQTADQVQAYMTQIDDTDLDASITRIQNVSMELYGNIQKIAHMKKLESFNYYREILYAFSNTVKTNISFNDAKKIVMSYNEALKNTSKLNLHTTDENGAKVVSQTELDSVKTLFEKSLK

SEQ ID NO: 282 - protein, 304 aa, Lactococcus lactis; identical to SEQ ID NO: 266
  33183_epsL

SEQ ID NO: 283 - protein, 148 aa, Lactococcus lactis; identical to SEQ ID NO: 267
  33183_nucleotide_sugar_dehydrogenase

SEQ ID NO: 284 - protein, 315 aa, Lactococcus lactis; identical to SEQ ID NO: 268
  33183_GT1

SEQ ID NO: 285 - protein, 184 aa, Lactococcus lactis; identical to SEQ ID NO: 269
  33183_acetyltransferase

SEQ ID NO: 286 - protein, 379 aa, Lactococcus lactis
  33183_wzy
MMKTKEKIFIALCFFAFIQPNFFVKINVLNYMSIGMALLCTLILLLRSFKKNVKFDITIFLLLLWRLLIFIPTLNHNGEIVKWGYQSVVFVGLYLLIKNYICDKDAFRIVYKMIFSYVLINILLMIIYPNGIFPQYGIYFLGIRTRFTEFSIALMYISLIYYNEYSSKNKKDRKKLITSYVLAIINILSKWVATGIVVIVLTILFYLLLRNKKKLSLVYCFGFLILIALSINLINGNLLNLFSGLFELLNKDITLTGRTIIWENAIYVAKNYFLFGFGYVNDGNIISYHNGLWQAHNTILQSMCESGIFGTLTLFMMIFKQGFPNKIDNKKINSLNVAIIFSFLIMMMTEITYYYPIFIFIIFLIGNNYKKLGEIKDDK

SEQ ID NO: 287 - protein, 361 aa, Lactococcus lactis; identical to SEQ ID NO: 271
  33183_GT2

SEQ ID NO: 288 - protein, 280 aa, Lactococcus lactis
  33183_GT3
VNLVEKKYSVLMSVYHKENPTWFDESIKSMFEQTIKPNEFVLVEDGPLTKELYDVVEKYKTKYPKEFKVVAIEKNVGLGPALKKGVEECSNEYIARMDSDDYSMPKRIEKEFEIFEKYSDIGMVGTSISEFIDSIDNVVCNVILPETNEDIIKFSKSRNPFRHPSVMFKKSEVVKAGNYREYYLCEDYDMWLRMIRNGCKYYNIQDIYVYMRIGEDFYKRRGGHKYFKSIKKFKKEQLENGYFTKFEYLKSIVPHAIVCYMPNFMRDFVYRKMLRRGRKK

SEQ ID NO: 289 - protein, 479 aa, Lactococcus lactis
  33183_wzx
LFNSGGLLMQIAKNYLYNAIYQVFIIIVPLLTIPYLSRILGPSGIGINSYTNSIVQYFVLFGSIGVGLYGNRQIAFVRDNQVKMSKVFYEIFILRLFTICLAYFLFVAFLIINGQYHAYYLSQSIAIVAAAFDISWFFMGIENFKVTVLRNFIVKLLALFSIFLFVKSYNDLNIYILITVLSTLIGNLTFFPSLHRYLVKVNYRELRPIKHLKQSLVMFIPQIAVQIYWVLNKTMLGSLDSVTSSGFFDQSDKIVKLVLAIATATGTVMLPRVANAFAHREYSKIKEYMYAGFSFVSAISIPMMFGLIAITPKFVPLFFTSQFSDVIPVLMIESIAIIFIAWSNAIGTQYLLPTNQNKSYTVSVIIGSIVNLMLNIPLIIYLGTVGASIATVISEMSVTVYQLFIIHKQLNLHTLFSDLSKYLIAGLVMFLIVFKISLLTPTSWIFILLEITVGIIIYVVLLIFLKAEIINKLKFIMHK

SEQ ID NO: 290 - DNA, 12651 bp, Lactococcus lactis
  Eps gene cluster of DSM 33133
atgaatgatttattttaccatcgtctaaaggaactagttgaatcaagtggtaaatctgcaaatcaaatagaaagggaattgggttaccctagaaattctttgaataattataagttgggaggagaaccctctgggacaagattaataggactatcagagtattttaatgtgtctccaaaatatctgatgggtataagtgatgagcctaatgacagttctgcaattaatctttttaaaactctaactcaagaagagaaaaaagaaatgtttataatttgtcaaaaatggctttttttagaatatcaaatagagttataacaataataaatttagggagtttttcttattaatatgatgaaaaaaggaatttttgtaattactatagtgatatctatagcattgataattggaggttttttatagttataattctaggataaataatctttcaaaagctgataaaggaaaagaagttgtaaaaaatagcagtgaaaaaaatcagatagaccttacctataaaaagtattataaaaatttaccaaaatcagttcaaaataaaatagatgatatttcatccaaaaataaagaagttactttaacttgtatttggcaatctgattcagttatttctgaacaatttcaacaaaacttacaaaaatattatggaaataagttttggaacatcaaaaatatcacctacaatggcgaaacaagtgaacaattattggctgaaaaagttcaaaatcaagtattggcgactaaccctgatgttgttttatatgaagctccactttttaatgataaccaatatagactactgggctagttacccagacaaaaattctgatgaaatgaaggggctgttttctgatgatggagtatatagaacattaaatgcttcggggaataaggtttggctagattatattactaaatattttacagcaaactaattaagttataaataacaattattaaatattggagaagaaatgcaggaaacacaggaacagacgattgatttaagagggatttttaaaattattcgcaaaaggttaggtttaatattatttagtgctttaatagtcacaatattagggagcatctacacattttttatagcctccccagtttacacagcctcaactcaacttgtcgttaaactaccaaattcggataattcagcagcctacgctggagaagtgaccgggaatattcaaatggcgaacacaattaaccaagttattgttagtccagtcattttaggtaaagttcaaagtaatttaaatctatctgatgactctttccaaaaacaagttacagcagcaaatcaaacaaattcacaagttattacgcttactgttaaatattctaatccttacattgcaaaaaagattgcagacgagactgctaaaatttttagttcagatgcagcaaaactattgaatgttactaacgttaatattctatccaaagcaaaagctcaaacaacaccaattagtcctaaacctaaattgtatttagcgatatctgttatagccggactagttttaggtttagccattgctttattgaaggaattgtttgataacaaaattaataaagaagaagatattgaagctctggggctcacggttcttggtgtaacaagctatgatcaaatgagtgattttaataagaatacaaataaaaatggcacgcaatcgggaactaagtcaagtccgcctagcgaccatgaagtaaatagatcatcaaaaaggaataaaagataggagttcaggatggctaaaaataaaagaagcatagacaataatcattatattattaccagtgtcaatcctcaatcacctatttccgaacaatatcgtacgattcgtacgaccattgattttaaaatggcggatcaaggaattaaaagttttctagtaacatcttcagaaacagatgaaggtaaaacagccgtaagtgctaatatagctgttgcttttgcacaacaaggtaaaaaagtacttttaattgatggcgatcttcgtaaaccgactgttaacattacttttaaagtacaaaatagagtaggattaaccaatattttaatgcatcaatcttcgattgaagatgccatacaagggacaagactttctgaaaatcttacaataattacctctggtccaattccacctaatccatcggaattattagcatctagtgcaatgaagaatttgattgactctgtgtccgatttctttgatgttgttttgattgatactccacctctctctgcagttactgatgctcaaattttgagtagttatgtaggaggagtggttcttgttgtacgtgcctatgaaacaaaaaaagagagtttagcaaaaacaaaaaaaaagctggaacaagttaatgcaaatatattaggagttgttttgcatggggtagactcttctgactcaccgtcgtattactactacggagtagagtaattggaataaattttaatcaaataaaagacagaaatttgtagaagaggagagcaaatgattgatattcattgccatattttaccgggtatagatgatggagctaaaacttctggagatactttgacaatgctgaaatcagcaattgatgaagggataacaaccatcaccgctactcctcatcataatcctcaatttaataatgaatcaccacttattttaaaaaaagttaaggaagttcaaaatatcattgacgagcatcaattaccaattgaagttttgcctggacaagaggttagaatatatggtgatttattaaaagaattttctgaaggaaagttactgaaagcagcgggcacttcaagttatatattgattgaatttccatcaaatcatgtgccagcttatgctaaagaacttttttataatattaaattggagggccttcaacctattttggtccaccctgagcgtaatagtggaatcattgagaaccctgatatattatttgattttattgaacaaggagtactaagtcagataacagcttcaagtgtcactggtcattttggtaaaaaaatacaaaagctatcatttaaaatgatagaaaaccatcttacgcattttgttgcatcagatgcgcataatgtgacgtcacgtgcatttaagatgaaggaagcatttgaaattattgaagatagttatggttctggtgtatcacgaatgttacaaaataatgcagactcggtgattttgaacgaaagtttttatcaagaagaaccaataaaaattaaaacaaagaaatttttgggattattttaaaaggattaaatggagtaaataatggaagtttttgaggcatcatctgaactggaagagcctaagttagtagaattaaaaaaattttctcgcagagagataattataaaaagagggattgatattttagggggattagcgggttcaggtttatttcttatcgcggctgcattgctttatgtcccttacaaaatgagctcaaaaaaagatcaagggccaatgttctataaacaaaaacggtatggaaaaaatggtaaaattttttatattttgaaatttagaacaatgataattaatgctgagcagtatttagagctacatccagaagttaaagccgcctatcatgccaatggcaataaactagaaagtgatccccgtgtaacgaagattgggtcatttattagacaacactcaattgatgaattaccacaatttatcaatgtccttaaaggagatatgtcattagttggtccaagaccaattttgctttttgaagcgaaagaatatggggagcgcctctcttacttactgatatgcaaacctggaattactggttattggacaacacatggtcgaagtaaagttctttttcctcaacgagcagatttagagctctattatctccagtaccatagtacaaaaaatgatataaaacttattatgcttacaataaaacaaattctacatggatcggatgcttattaaagtaacattatgaaaaaaaaaacaactaaaatttgcatgatttcttcttctgggggtcatttaaaagagcttaatgaattgatagagatttcagagcagtatgaaacgtttcaaattactgaaaaagataaattttctaatatcaagattggaactaggcaatactatgtgaataaaattgatagagatgaaaaaaattttttatttcatttttttattctttttttgaaaatatttcaaatatttgctgtagagaagcctaaagttatagtaaccactggtgccttagtagcttatccagcatgtctaataggaaaattaatgagagctaaagttatttttatagagtcttatgctcgaacagaaacattatcattaacaggaaaattagtttataggttatctgatttatttattgttcaatggccagatctttcaaaaaaatattctaaagctaaatactatggggaattattctgatgatattaataatattagggactcaaaaatttcaattcaaccgacttataaaaaaagttgataaattaatagaagatgatcaaatcaaagattctgtaatagctcaaatcggatattctaattacaaacctataaattataaattttcagatttttttgatcaatcggaatttgattcattaataaataaatcagatataataataactcatggaggagtaggtgggatagtttcttccttaaaaaagaataaaaaaatcatagtagttccgcgtttaaagaaatacagagaacatattgatgatcatcaattagagatagcaagggcgtttcaaagaaaaaatctagttattttaaacgagaatctaaatgaactatgtaatgatatatctaaaattgaatcattcgagccaatacactatgtcaaagataataaaaaaattatatgtgaaataaaaaaatttatatcgaaagttaaatgatatttttatacaaaattatcttatgatgagaaaggactttttaaaagataaaaaatgataaaattgagcattataattccaatttataacgtggaaaaatatttaagtaaatgtttaaattctattttagaacaaacttataaagaaatagaaataatattagtaaatgatggtagtactgataactcaaaagatatagctgtaagctattgtgaaagatttcctaatgtttttaaatattttgagaaagataacggaggcctctcttcagccagaaattttggacttgaaaaaatttctggtgattttgtaggcttcttagactcagatgactatatagataacgatttatatgaaattatgattaattcattggatagttcaataaaaattgtggaatgtgattttatatgggaatacgaaaatggaaaaagtgtccttgataaaacatctgaatataattctatcaaagacttaatggttaacggtagagttgttgcttggaataaaatatataatgttgaatggttagaaaaaataaacataaagtttaaagaaggtctattgtatgaagatttaaattttttcttcaaaattgttcctcacttgactagtatttcagaagtatcaacagttaaaaatagttttgttcactatgtccagcataaaggtacaataacttcagataattctcttaatatcttggatatcataaaatcttacgaagatgtctttcattattataacgaaaaacagattaatgatttatattttgatgagctagaatataaattttctaggaacttaatgggggcatttttaaaaagagcaattaagattaaagataaaagacaacgtaaaataattttagatgaattttggaataatgttttatcttactatccgaattggaaaaaaaataaatatataaaaaaactatcaaaacagaatatacttttattttttattaataaatatacatataaattattttatttattataaaaaaaatttaatattagagtatttgtattagttgcaatgaaaatatcgaaagtagaataaatgatttatgtagaaataaggggaaacttaggtaatcaattatttatctatgccaccgcaaaaaaaattcaaaagttaaccggacaaaaaattcaattaaatacaacaactttaaataaatactttccaaattacaagtttggcctttcagaatttataatggaggatcctgattgttttattgaatcctataaaaaattaccctggttcacaaacgagtatctcttacctattaaaatttttaaaaaaatattgaataaaacacccaaaattaataaaatcctttcagatttttttttcaaagcttttgaaaaaaaaggatattttatttggcgaggagagacttttaaaaagttttctttaggaaatcataaaaattactatttatcaggtttttggcaatcggaagaatatttttatgatataagggatgaattattagaaatcatcactcctataaattcaataagagagtgtaactttgaacttctcaatttaataaggaattcagaatcaatttgtgtttcaatacgccgaggagattatgtagataatcctaaaatatcagctatttataacgtatgtgatataaattattttatagaatctgtaaatgaaataaagaaaaatgttgtgaatgttaaagttatctgtttttcagatgatgttgaatgggtcaaaaaaaatataaaattcgactgtgaaacacattatgaaacttatggtaattctttatctgaaaaagttcaacttatgtcttcttgtaaacattttgttttatctaatagttcttttagttggtggacagaatttttatctatacgaggtgggattactatagcccccaaaaattggtatgcagatgaacgtgaagctgatatctatagaaaaaattggatttacttagaagataagacagaggaagagtaatgggatttctatttttaactataatacttattttgtgggggtatagttttaccaatataaaaataagcccttttagtattttattcatgagtttagggatcttttactctcaatttacttcaataaatattgacttaataataaaagtactttttttgataacttccataatttatcttattaaagataaatattcaaaaaaatacgttttttctttattattaattgcagtattaattttaattgagtcaactagtccctctaaatttaatcaatattatggttttattgatgctttgacatcatttgcaaccttctcaacaggcatacttctattttccataaaatttagtttacaagaacgcagaagtattttaaaatcaatttcatatttgccaatcttttcagtgttaattggaatccctctaacttttggtggttttatatctatgacagctagaggcggaattgccctttcaggagcagctttagaaacaaatttatcttttttttcagttctaagccttgtttcattagatattttatatcaggacactcgttctaataaatatcaaattttaaaaattattaactttatattgctatgttgtactttaacacgaggcggtattatttctggaattatcattattttaccaagtttactatttcttttaaaaaaaggatttaaaggagtaagacaatttatttttttgattattactatttttgggagtatttatccgcttattttattgtggaaaagtattagtgagaggactttcagtgcagatggtattaatacttcaggtcgatatacggcctgggactatattgtgaatttgacaacaaacaaatctcagggaatgggattgggaagtttaaagacattaactgaggatattaatttacgtgcctttactgctgctcataatacatatattcaattttattatgaaactggttatttgggagtaacactattatctattttatttattttaatattaataataatcctaaaattgactaattatagaaaaaaaatcatttacttaacattcatttcatttttagtatatagttatacagataattgtattgttaataatagatactggtatttgtttatgtttattataggatgttttaaatattttgacagaaaggaagaaaatgcgctactttaaaatattatttgagattattcaactattggtagctagtattttatgtagattatataaaaatccaaatgatatctggctaataaatgaaaaacctgatgaagctagagataatggttatgctttttatcaatatttaagaaagaatttccccgatattaaagtttattatgtaatcagtaaagagtctactgatatttataagtttgataatgaaactaacattgtattttataagagttttttacattttattttatatatcaaatctaaagttttaattagttctcaaacattgccctatccatctagcagaaaattatgtgaagcgctaatgtaccttaatttgaataaaccaaagaggatttggttacaacatggagttactaaagataaactcccatatgagaatatggcaagggaaatttttaagtatgatttaataacctgtgtttcattaaaagaggctaattttataatgaaagaatatggatataatgaagatcaggtgaaggctcttggatttgcaagatatgataatttgccaattggaaataataacacatttgatatacttataatgcctactttccgtaagggttacgagattaaaaattttagtctcccaacagatagtgaaactaaacattttgaggaaagtgtattctttaaaacatatgttgatttattgaattctgaagagctagacgagtatttagaaaagtctggtaaaaaagcaattttttatttacactatgcttttcaaccatatgcaaaatctttttctaaacgactaatgtcttcaaatgttatcattgctgaaagaacagaatatgatgttcaaaaactattaattaattgtgaattgctaattacagattattcaagcgttttttttgatttttcatatatgaaaaaacctgaaatatttttccattttgatgagaaagaatatagaagtaatcattatagggagggatattttgattataaaacagatggatttggtccagtagttaattctaaagaagaattactaactgaaatcaaagagtttattgataacccatctctgttaatggaatttaataagcgagctaataatttcttcaaatatactgataacaataattgccaacgtattttaaaagaaatttggagaattaatgaaactaattaagaattatttaatgacaagctcttatcaattgttaattattatcttaccaataataacaacaccatatatatcgagagtacttagtccagaagggattggactttattcatatacttatactattacacagtatttcgtattatttgctactcttggtactgttacgtatggtagcagagagatagcatattatcagtcaaataaacaaaagagaagtgaaattttttggggaattaccttccttagctgggctactggtgctatatcacttttaatattttatatatttattttttttaatggcaaatatagtgttttatttttttggcaaagctttttgatttttggagttatttttgatattaattggtatttcacaggaatggaaaagttcaaggttattatttcacgtaacttttgtataaaaattattagtttattgtgtatttttgtctttgtaaaatctgagaaagatttaagtttatatatagttatactaggattgagcaatataataggtaatatattagtttggccatatttgagaaaagaggtttataaacctaatttttctaagttatcattcaaaaaacatttgggaagtacatggatattttttttgccacaaacttctgttactttaaactcattaataaaccaaaatatgattgcatattttgactcaataacaagcttaggatactttacacaaacaaataagtttactgtgattgcgatttcaatagttatttcaattgggactgttatgttgcctagaatgtccaatttagttgcgcgcaaagagtattcaaagtttacagactatgttactaagagtattaatataagctcaggaatttctatagcaataatgtttggtttaatggctatagcacctaagtttacaactttttttttaggagctcaatataaatttgttattcatttgctagttttatcatcaccgatagtggttttagtaacctggagtaatgttcttggtcaacaatatttaatacctttaaataggatgaaaatatttacaaaatctctaatttgtggaaacttagtaaatgtttctctaaacttgattttgttacccaaaatgggagtagaaatttcaataataaatcagttaattaatgaaattattattgtaggtattcaatttatatcagttagaaaagagttaaaaataaatataatattaggagatctaataaaatatttttttgcgggtataattatgtttattgccgttttatatctgaatttacaattaccgatgactatcttcacactacttatagagattggtattggagttcttatatattcaatgctagttatttctcttaaaactggattatataaagaattgaaaaagattattaaaattcgttagcttaaaatctatcacctttcatttgagtagtaagaaatacaaagctttattataaaatttatcatttttaagactatcataaaagaagaaggatgacatggaacgaaaaaagaagaaaaaaaaaatatatataattattctaatattattaatgtttatcactattgtttgttttgggggatatgctacacgagagttaattactcccactgaaaaaacaataccaaatgtctcggatcaacctaaaaaaacttcggcctctaacggttatgtagagcaaaaaggggaagaagctgctgtgggtagtatagcacttgtagacgatgctggtgtaccagaatgggttaaagttccctcaaaggtaaatctagataaatttactgatttatctacgaataatatcactatttatcgaattaataatccggaagtcttaaaaacagttaccaatcgtacagatcaacggatgaaaatgtcagaagttatagctaagtatcctaatgctttgattatgaatgcttccgcttttgatatgcagacaggacaagtagctggatttcaaattaataatggaaagttgattcaagactggagtccaggtacaacgactcaatatgcttttgttattaacaaagatggttcgtgcaaaatttatgattcaagtacacctgctttaactattattaaaaatggagggcaacaagcctatgattttggtactgcgattatccgtgatggtaaaattcaaccaagtgatggctcagtagattggaagattcatatttttattgcgaatgataaagataataatctctatgctattttgagtgatacaaatgcaggttatgataatataataaaatcagtatcaaatttgaagctccaaaatatgttattacttgatagtggtggctcaagtcaactatctgtcaatggtaaaacgattgttgctagtcaagatgatcgagccgtaccggattatattgtgatgaaataaaaataaaagaacctcatggttcttttattttagagatttttcaaaaagggttttgactgagtctaattctgtttgagaaacgaccttagctccattttcatctgttgtatgtagattgagcttgctggtattctttagagccttactgtagctcataacgatcgttttagcatcattgaaacttatattggttttaacagtgtttgaaaaagcatagagaatttctcgatagtaattgaaactttcaagttttttcatatgagcaattttttgaatatttccgtagagttccattgagacattttgaatccgagtgattgaagcatccaaatcagtatcgtcaatttgtgtcatataggcttggacttgatcagcagtttgtaaattaacagttccttgtttaaactcataaccttcagccttgaatgcctttggattttgcatggtgattccaccagtggcctgtacaagtgatcccattttattaacatcgatctgaattactttgttaatggacgcattcaataggtctttaaccatctggaaaattccatcatctccattcgtattgtaaacttcagtgattgttttttgattaggcattgtcgcaaaaactgggaagttcatgaaagtagtttgatttgtctttacattcgttgaagctaaaacagtagcataagctgaatttttagaattatttttaccagttgcaatgataagtgtggtgaatgttttagctttttttaagtcaatacttgttgttttagggaaattttcatatgatgttgaaaaggttgattcaacatttctataagctacgtaggctatagaagcaacagaaataattactaatacaaaaataattgaaataacttttagtactgtgtattttttcttacgataatgacgcctctttttttgattcat

SEQ ID NO: 291 - DNA, 12651 bp, Lactococcus lactis; identical to SEQ ID NO: 183
  Eps gene cluster 33204, 33205, 33220, 33221, 33218, 33219, 33224,33197, 33196, 33195, 33194, 33226, 33223, 33193 and 33192

SEQ ID NO: 292 - DNA, 12651 bp, Lactococcus lactis
  Eps gene cluster of 33200, 33201, 33202 and 33203
atgaatgatttattttaccatcgtctaaaggaactagttgaatcaagtggtaaatctgcaaatcaaatagaaagggaattgggttaccctagaaattctttgaataattataagttgggaggagaaccctctgggacaagattaataggactatcagagtattttaatgtgtctccaaaatatctgatgggtataagtgatgagcctaatgacagttctgcaattaatctttttaaaactctaactcaagaagagaaaaaagaaatgtttataatttgtcaaaaatggctttttttagaatatcaaatagagttataacaataataaatttagggagtttttcttattaatatgatgaaaaaaggaatttttgtaattactatagtgatatctatagcattgataattggaggttttttatagttataattctaggataaataatctttcaaaagctgataaaggaaaagaagttgtaaaaaatagcagtgaaaaaaatcagatagaccttacctataaaaagtattataaaaatttaccaaaatcagttcaaaataaaatagatgatatttcatccaaaaataaagaagttactttaacttgtatttggcaatctgattcagttatttctgaacaatttcaacaaaacttacaaaaatattatggaaataagttttggaacatcaaaaatatcacctacaatggcgaaacaagtgaacaattattggctgaaaaagttcaaaatcaagtattggcgactaaccctgatgttgttttatatgaagctccactttttaatgataaccaatatagactactgggctagttacccagacaaaaattctgatgaaatgaaggggctgttttctgatgatggagtatatagaacattaaatgcttcggggaataaggtttggctagattatattactaaatattttacagcaaactaattaagttataaataacaattattaaatattggagaagaaatgcaggaaacacaggaacagacgattgatttaagagggatttttaaaattattcgcaaaaggttaggtttaatattatttagtgctttaatagtcacaatattagggagcatctacacattttttatagcctccccagtttacacagcctcaactcaacttgtcgttaaactaccaaattcggataattcagcagcctacgctgtagaagtgaccgggaatattcaaatggcgaacacaattaaccaagttattgttagtccagtcattttagataaagttcaaagtaatttaaatctatctgatgactctttccaaaaacaagttacagcagcaaatcaaacaaattcacaagttattatgcttactgttaaatattctaatccttacattgcaaaaaagattgcagacgagactgctaaaatttttagttcagatgcagcaaaactattgaatgttactaacgttaatattctatccaaagcaaaagctcaaacaacaccaattagtcctaaacctaaattgtatttagcgatatctgttatagccggactagttttaggtttagccattgctttattgaaggaattgtttgataacaaaattaataaagaagaagatattgaagctctggggctcacggttcttggtgtaacaagctatgatcaaatgagtgattttaataagaatacaaataaaaatggcacgcaatcgggaactaagtcaagtccgcctagcgaccatgaagtaaatagatcatcaaaaaggaataaaagataggagttcaggatggctaaaaataaaagaagcatagacaataatcattatattattaccagtgtcaatcctcaatcacctatttccgaacaatatcgtacgattcgtacgaccattgattttaaaatggcggatcaaggaattaaaagttttctagtaacatcttcagaaacagatgaaggtaaaacaaccgtaagtgctaatatagctgttgcttttgcacaacaaggtaaaaaagtacttttaattgatggcgatcttcgtaaaccgactgttaacattacttttaaagtacaaaatagagtaggattaaccaatattttaatgcatcaatcttcgattgaagatgccatacaagggacaagactttctgaaaatcttacaataattacctctggtccaattccacctaatccatcggaattattagcatctagtgcaatgaagaatttgattgactctgtgtccgatttctttgatgttgttttgattgatattccacctctctctgcagttactgatgctcaaattttgagtagttatgtaggaggagtggttcttgttgtacgtgcctatgaaacaaaaaaagagagtttagcaaaaacaaaaaaaaagctggaacaagttaatgcaaatatattaggagttgttttgcatggggtagactcttctgactcaccgtcgtattactactacggagtagagtaattggaataaattttaatcaaataaaagacagaaatttgtagaagaggagagcaaatgattgatattcattgccatattttaccgggtatagatgatggagctaaaacttctggagatactttgacaatgctgaaatcagcaattgatgaagggataacaaccatcaccgctactcctcatcataatcctcaatttaataatgaatcaccacttattttaaaaaaagttaaggaagttcaaaatatcattgacgagcatcaattaccaattgaagttttgcctggacaagaggttagaatatatggtgatttattaaaagaattttctgaaggaaagttactgaaagcagcgggcacttcaagttatatattgattgaatttccatcaaatcatgtgccagcttatgctaaagaacttttttataatattaaattggagggccttcaacctattttggtccaccctgagcgtaatagtggaatcattgagaaccctgatatattatttgattttattgaacaaggagtactaagtcagataacagcttcaagtgtcactggtcattttggtaaaaaaatacaaaagctatcatttaaaatgatagaaaaccatcttacgcattttgttgcatcagatgcgcataatgtgacgtcacgtgcatttaagatgaaggaagcatttgaaattattgaagatagttatggttctggtgtatcacgaatgttacaaaataatgcagactcggtgattttgaacgaaagtttttatcaagaagaaccaataaaaattaaaacaaagaaatttttgggattattttaaaaggattaaatggagtaaataatggaagtttttgaggcatcatctgaactggaagagcctaagttagtagaattaaaaaaattttctcgcagagagataattataaaaagagggattgatattttagggggattagcgggttcaggtttatttcttatcgcggctgcattgctttatgtcccttacaaaatgagctcaaaaaaagatcaagggccaatgttctataaacaaaaacggtatggaaaaaatggtaaaattttttatattttgaaatttagaacaatgataattaatgctgagcagtatttagagctacatccagaagttaaagccgcctatcatgccaatggcaataaactagaaagtgatccccgtgtaacgaagattgggtcatttattagacaacactcaattgatgaattaccacaatttatcaatgtccttaaaggagatatgtcattagttggtccaagaccaattttgctttttgaagcgaaagaatatggggagcgcctctcttacttactgatatgcaaacctggaattactggttattggacaacacatggtcgaagtaaagttctttttcctcaacgagcagatttagagctctattatctccagtaccatagtacaaaaaatgatataaaacttattatgcttacaataaaacaaattctacatggatcggatgcttattaaagtaacattatgaaaaaaaaaacaactaaaatttgcatgatttcttcttctgggggtcatttaaaagagcttaatgaattgatagagatttcagagcagtatgaaacgtttcaaattactgaaaaagataaattttctaatatcaagattggaactaggcaatactatgtgaataaaattgatagagatgaaaaaaattttttatttcatttttttattctttttttgaaaatatttcaaatatttgctgtagagaagcctaaagttatagtaaccactggtgccttagtagcttatccagcatgtctaataggaaaattaatgagagctaaagttatttttatagagtcttatgctcgaacagaaacattatcattaacaggaaaattagtttataggttatctgatttatttattgttcaatggccagatctttcaaaaaaatattctaaagctaaatactatggggaattattctgatgatattaataatattagggactcaaaaatttcaattcaaccgacttataaaaaaagttgataaattaatagaagatgatcaaatcaaagattctgtaatagctcaaatcggatattctaattacaaacctataaattataaattttcagatttttttgatcaatcggaatttgattcattaataaataaatcagatataataataactcatggaggagtaggtgggatagtttcttccttaaaaaagaataaaaaaatcatagtagttccgcgtttaaagaaatacagagaacatattgatgatcatcaattagagatagcaagggcgtttcaaagaaaaaatctagttattttaaacgagaatctaaatgaactatgtaatgatatatctaaaattgaatcattcgagccaatacactatgtcaaagataataaaaaaattatatgtgaaataaaaaaatttatatcgaaagttaaatgatatttttatacaaaattatcttatgatgagaaaggactttttaaaagataaaaaatgataaaattgagcattataattccaatttataacgtggaaaaatatttaagtaaatgtttaaattctattttagaacaaacttataaagaaatagaaataatattagtaaatgatggtagtactgataactcaaaagatatagctgtaagctattgtgaaagatttcctaatgtttttaaatattttgagaaagataacggaggcctctcttcagccagaaattttggacttgaaaaaatttctggtgattttgtaggcttcttagactcagatgactatatagataacgatttatatgaaattatgattaattcattggatagttcaataaaaattgtggaatgtgattttatatgggaatacgaaaatggaaaaagtgtccttgataaaacatctgaatataattctatcaaagacttaatggttaacggtagagttgttgcttggaataaaatatataatgttgaatggttagaaaaaataaacataaagtttaaagaaggtctattgtatgaagatttaaattttttcttcaaaattgttcctcacttgactagtatttcagaagtatcaacagttaaaaatagttttgttcactatgtccagcataaaggtacaataacttcagataattctcttaatatcttggatatcataaaatcttacgaagatgtctttcattattataacgaaaaacagattaatgatttatattttgatgagctagaatataaattttctaggaacttaatgggggcatttttaaaaagagcaattaagattaaagataaaagacaacgtaaaataattttagatgaattttggaataatgttttatcttactatccgaattggaaaaaaaataaatatataaaaaaactatcaaaacagaatatacttttattttttattaataaatatacatataaattattttatttattataaaaaaaatttaatattagagtatttgtattagttgcaatgaaaatatcgaaagtagaataaatgatttatgtagaaataaggggaaacttaggtaatcaattatttatctatgccaccgcaaaaaaaattcaaaagttaaccggacaaaaaattcaattaaatacaacaactttaaataaatactttccaaattacaagtttggcctttcagaatttataatggaggatcctgattgttttattgaatcctataaaaaattaccctggttcacaaacgagtatctcttacctattaaaatttttaaaaaaatattgaataaaacacccaaaattaataaaatcctttcagatttttttttcaaagcttttgaaaaaaaaggatattttatttggcgaggagagacttttaaaaagttttctttaggaaatcataaaaattactatttatcaggtttttggcaatcggaagaatatttttatgatataagggatgaattattagaaatcatcactcctataaattcaataagagagtgtaactttgaacttctcaatttaataaggaattcagaatcaatttgtgtttcaatacgccgaggagattatgtagataatcctaaaatatcagctatttataacgtatgtgatataaattattttatagaatctgtaaatgaaataaagaaaaatgttgtgaatgttaaagttatctgtttttcagatgatgttgaatgggtcaaaaaaaatataaaattcgactgtgaaacacattatgaaacttatggtaattctttatctgaaaaagttcaacttatgtcttcttgtaaacattttgttttatctaatagttcttttagttggtggacagaatttttatctatacgaggtgggattactatagcccccaaaaattggtatgcagatgaacgtgaagctgatatctatagaaaaaattggatttacttagaagataagacagaggaagagtaatgggatttctatttttaactataatacttattttgtgggggtatagttttaccaatataaaaataagcccttttagtattttattcatgagtttagggatcttttactctcaatttacttcaataaatattgacttaataataaaagtactttttttgataacttccataatttatcttattaaagataaatattcaaaaaaatacgttttttctttattattaattgcagtattaattttaattgagtcaactagtccctctaaatttaatcaatattatggttttattgatgctttgacatcatttgcaaccttctcaacaggcatacttctattttccataaaatttagtttacaagaacgcagaagtattttaaaatcaatttcatatttgccaatcttttcagtgttaattggaatccctctaacttttggtggttttatatctatgacagctagaggaggaattgccctttcaggagcagctttagaaacaaatttatcttttttttcagttctaagccttgtttcattagatattttatatcaggacactcgttctaataaatatcaaattttaaaaattattaactttatattgctatgttgtactttaacacgaggcggtattatttctggaattatcattattttaccaagtttactatttcttttaaaaaaaggatttaaaggagtaagacaatttatttttttgattattactatttttgggagtatttatccgcttattttattgtggaaaagtattagtgagaggactttcagtgcagatggtattaatacttcaggtcgatatacggcctgggactatattgtgaatttgacaacaaacaaatctcagggaatgggattgggaagtttaaagacattaactgaggatattaatttacgtgcctttactgctgctcataatacatatattcaattttattatgaaactggttatttgggagtaacactattatctattttatttattttaatattaataataatcctaaaattgactaattatagaaaaaaaatcatttacttaacattcatttcatttttagtatatagttatacagataattgtattgttaataatagatactggtatttgtttatgtttattataggatgttttaaatattttgacagaaaggaagaaaatgcgctactttaaaatattatttgagattattcaactattggtagctagtattttatgtagattatataaaaatccaaatgatatctggctaataaatgaaaaacctgatgaagctagagataatggttatgctttttatcaatatttaagaaagaatttccccgatattaaagtttattatgtaatcagtaaagagtctactgatatttataagtttgataatgaaactaacattgtattttataagagttttttacattttattttatatatcaaatctaaagttttaattagttctcaaacattgccctatccatctagcagaaaattatgtgaagcgctaatgtaccttaatttgaataaaccaaagaggatttggttacaacatggagttactaaagataaactcccatatgagaatatggcaagggaaatttttaagtatgatttaataacctgtgtttcattaaaagaggctaattttataatgaaagaatatggatataatgaagatcaggtgaaggctcttggatttgcaagatatgataatttgccaattggaaataataacacatttgatatacttataatgcctactttccgtaagggttacgagattaaaaattttagtctcccaacagatagtgaaactaaacattttgaggaaagtgtattctttaaaacatatgttgatttattgaattctgaagagctagacgagtatttagaaaagtctggtaaaaaagcaattttttatttacactatgcttttcaaccatatgcaaaatctttttctaaacgactaatgtcttcaaatgttatcattgctgaaagaacagaatatgatgttcaaaaactattaattaattgtgaattgctaattacagattattcaagcgttttttttgatttttcatatatgaaaaaacctgaaatatttttccattttgatgagaaagaatatagaagtaatcattatagggagggatattttgattataaaacagatggatttggtccagtagttaattctaaagaagaattactaactgaaatcaaagagtttattgataacccatctctgttaatggaatttaataagcgagctaataatttcttcaaatatactgataacaataattgccaacgtattttaaaagaaatttggagaattaatgaaactaattaagaattatttaatgacaagctcttatcaattgttaattattatcttaccaataataacaacaccatatatatcgagagtacttagtccagaagggattggactttattcatatacttatactattacacagtatttcgtattatttgctactcttggtactgttacgtatggtagcagagagatagcatattatcagtcaaataaacaaaagagaagtgaaattttttggggaattaccttccttagctgggctactggtgctatatcacttttaatattttatatatttattttttttaatggcaaatatagtgttttatttttttggcaaagctttttgatttttggagttatttttgatattaattggtatttcacaggaatggaaaagttcaaggttattatttcacgtaacttttgtataaaaattattagtttattgtgtatttttgtctttgtaaaatctgagaaagatttaagtttatatatagttatactaggattgagcaatataataggtaatatattagtttggccatatttgagaaaagaggtttataaacctaatttttctaagttatcattcaaaaaacatttgggaagtacatggatattttttttgccacaaacttctgttactttaaactcattaataaaccaaaatatgattgcatattttgactcaataacaagcttaggatactttacacaaacaaataagtttactgtgattgcgatttcaatagttatttcaattgggactgttatgttgcctagaatgtccaatttagttgcgcgcaaagagtattcaaagtttacagactatgttactaagagtattaatataagctcaggaatttctatagcaataatgtttggtttaatggctatagcacctaagtttacaactttttttttaggagctcaatataaatttgttattcatttgctagttttatcatcaccgatagtggttttagtaacctggagtaatgttcttggtcaacaatatttaatacctttaaataggatgaaaatatttacaaaatctctaatttgtggaaacttagtaaatgtttctctaaacttgattttgttacccaaaatgggagtagaaatttcaataataaatcagttaattaatgaaattattattgtaggtattcaatttatatcagttagaaaagagttaaaaataaatataatattaggagatctaataaaatatttttttgcgggtataattatgtttattgccgttttatatctgaatttacaattaccgatgactatcttcacactacttatagagattggtattggagttcttatatattcaatgctagttatttctcttaaaactggattatataaagaattgaaaaagattattaaaattcgttagcttaaaatctatcacctttcatttgagtagtaagaaatacaaagctttattataaaatttatcatttttaagactatcataaaagaagaaggatgacatggaacgaaaaaagaagaaaaaaaaaatatatataattattctaatattattaatgtttatcactattgtttgttttgggggatatgctacacgagagttaattactcccactgaaaaaacaataccaaatgtctcggatcaacctaaaaaaacttcggcctctaacggttatgtagagcaaaaaggggaagaagctgctgtgggtagtatagcacttgtagacgatgctggtgtaccagaatgggttaaagttccctcaaaggtaaatctagataaatttactgatttatctacgaataatatcactatttatcgaattaataatccggaagtcttaaaaacagttaccaatcgtacagatcaacggatgaaaatgtcagaagttatagctaagtatcctaatgctttgattatgaatgcttccgcttttgatatgcagacaggacaagtagctggatttcaaattaataatggaaagttgattcaagactggagtccaggtacaacgactcaatatgcttttgttattaacaaagatggttcgtgcaaaatttatgattcaagtacacctgctttaactattattaaaaatggagggcaacaagcctatgattttggtactgcgattatccgtgatggtaaaattcaaccaagtgatggctcagtagattggaagattcatatttttattgcgaatgataaagataataatctctatgctattttgagtgatacaaatgcaggttatgataatataataaaatcagtatcaaatttgaagctccaaaatatgttattacttgatagtggtggctcaagtcaactatctgtcaatggtaaaacgattgttgctagtcaagatgatcgagccgtaccggattatattgtgatgaaataaaaataaaagaacctcatggttcttttattttagagatttttcaaaaagggttttgactgagtctaattctgtttgagaaacgaccttagctccattttcatctgttgtatgtagattgagcttgctggtattctttagagccttactgtagctcataacgatcgttttagcatcattgaaacttatattggttttaacagtgtttgaaaaagcatagagaatttctcgatagtaattgaaactttcaagttttttcatatgagcaattttttgaatatttccgtagagttccattgagacattttgaatccgagtgattgaagcatccaaatcagtatcgtcaatttgtgtcatataggcttggacttgatcagcagtttgtaaattaacagttccttgtttaaactcataaccttcagccttgaatgcctttggattttgcatggtgattccaccagtggcctgtacaagtgatcccattttattaacatcgatctgaattactttgttaatggacgcattcaataggtctttaaccatctggaaaattccatcatctccattcgtattgtaaacttcagtgattgttttttgattaggcattgtcgcaaaaactgggaagttcatgaaagtagtttgatttgtctttacattcgttgaagctaaaacagtagcataagctgaatttttagaattatttttaccagttgcaatgataagtgtggtgaatgttttagctttttttaagtcaatacttgttgttttagggaaattttcatatgatgttgaaaaggttgattcaacatttctataagctacgtaggctatagaagcaacagaaataattactaatacaaaaataattgaaataacttttagtactgtgtattttttcttacgataatgacgcctctttttttgattcat

SEQ ID NO: 293 - DNA, 12651 bp, Lactococcus lactis
  Eps gene cluster of 33222
atgaatgatttattttaccatcgtctaaaggaactagttgaatcaagtggtaaatctgcaaatcaaatagaaagggaattgggttaccctagaaattctttgaataattataagttgggaggagaaccctctgggacaagattaataggactatcagagtattttaatgtgtctccaaaatatctgatgggtataagtgatgagcctaatgacagttctgcaattaatctttttaaaactctaactcaagaagagaaaaaagaaatgtttataatttgtcaaaaatggctttttttagaatatcaaatagagttataacaataataaatttagggagtttttcttattaatatgatgaaaaaaggaatttttgtaattactatagtgatatctatagcattgataattggaggttttttatagttataattctaggataaataatctttcaaaagctgataaaggaaaagaagttgtaaaaaatagcagtgaaaaaaatcagatagaccttacctataaaaagtattataaaaatttaccaaaatcagttcaaaataaaatagatgatatttcatccaaaaataaagaagttactttaacttgtatttggcaatctgattcagttatttctgaacaatttcaacaaaacttacaaaaatattatggaaataagttttggaacatcaaaaatatcacctacaatggcgaaacaagtgaacaattattggctgaaaaagttcaaaatcaagtattggcgactaaccctgatgttgttttatatgaagctccactttttaatgataaccaatatagactactgggctagttacccagacaaaaattctgatgaaatgaaggggctgttttctgatgatggagtatatagaacattaaatgcttcggggaataaggtttggctagattatattactaaatattttacagcaaactaattaagttataaataacaattattaaatattggagaagaaatgcaggaaacacaggaacagacgattgatttaagagggatttttaaaattattcgcaaaaggttaggtttaatattatttagtgctttaatagtcacaatattagggagcatctacacattttttatagcctccccagtttacacagcctcaactcaacttgtcgttaaactaccaaattcggataattcagcagcctacgctggagaagtgaccgggaatattcaaatggcgaacacaattaaccaagttattgttagtccagtcattttagataaagttcaaagtaatttaaatctatctgatgactctttccaaaaacaagttacagcagcaaatcaaacaaattcacaagttattatgcttactgttaaatattctaatccttacattgcaaaaaagattgcagacgagactgctaaaatttttagttcagatgcagcaaaactattgaatgttactaacgttaatattctatccaaagcaaaagctcaaacaacaccaattagtcctaaacctaaattgtatttagcgatatctgttatagccggactagttttaggtttagccattgctttattgaaggaattgtttgataacaaaattaataaagaagaagatattgaagctctggggctcacggttcttggtgtaacaagctatgatcaaatgagtgattttaataagaatacaaataaaaatggcacgcaatcgggaactaagtcaagtccgcctagcgaccatgaagtaaatagatcatcaaaaaggaataaaagataggagttcaggatggctaaaaataaaagaagcatagacaataatcattatattattaccagtgtcaatcctcaatcacctatttccgaacaatatcgtacgattcgtacgaccattgattttaaaatggcggatcaaggaattaaaagttttctagtaacatcttcagaaacagatgaaggtaaaacaaccgtaagtgctaatatagctgttgcttttgcacaacaaggtaaaaaagtacttttaattgatggcgatcttcgtaaaccgactgttaacattacttttaaagtacaaaatagagtaggattaaccaatattttaatgcatcaatcttcgattgaagatgccatacaagggacaagactttctgaaaatcttacaataattacctctggtccaattccacctaatccatcggaattattagcatctagtgcaatgaagaatttgattgactctgtgtccgatttctttgatgttgttttgattgatattccacctctctctgcagttactgatgctcaaattttgagtagttatgtaggaggagtggttcttgttgtacgtgcctatgaaacaaaaaaagagagtttagcaaaaacaaaaaaaaagctggaacaagttaatgcaaatatattaggagttgttttgcatggggtagactcttctgactcaccgtcgtattactactacggagtagagtaattggaataaattttaatcaaataaaagacagaaatttgtagaagaggagagcaaatgattgatattcattgccatattttaccgggtatagatgatggagctaaaacttctggagatactttgacaatgctgaaatcagcaattgatgaagggataacaaccatcaccgctactcctcatcataatcctcaatttaataatgaatcaccacttattttaaaaaaagttaaggaagttcaaaatatcattgacgagcatcaattaccaattgaagttttgcctggacaagaggttagaatatatggtgatttattaaaagaattttctgaaggaaagttactgaaagcagcgggcacttcaagttatatattgattgaatttccatcaaatcatgtgccagcttatgctaaagaacttttttataatattaaattggagggccttcaacctattttggtccaccctgagcgtaatagtggaatcattgagaaccctgatatattatttgattttattgaacaaggagtactaagtcagataacagcttcaagtgtcactggtcattttggtaaaaaaatacaaaagctatcatttaaaatgatagaaaaccatcttacgcattttgttgcatcagatgcgcataatgtgacgtcacgtgcatttaagatgaaggaagcatttgaaattattgaagatagttatggttctggtgtatcacgaatgttacaaaataatgcagactcggtgattttgaacgaaagtttttatcaagaagaaccaataaaaattaaaacaaagaaatttttgggattattttaaaaggattaaatggagtaaataatggaagtttttgaggcatcatctgaactggaagagcctaagttagtagaattaaaaaaattttctcgcagagagataattataaaaagagggattgatattttagggggattagcgggttcaggtttatttcttatcgcggctgcattgctttatgtcccttacaaaatgagctcaaaaaaagatcaagggccaatgttctataaacaaaaacggtatggaaaaaatggtaaaattttttatattttgaaatttagaacaatgataattaatgctgagcagtatttagagctacatccagaagttaaagccgcctatcatgccaatggcaataaactagaaagtgatccccgtgtaacgaagattgggtcatttattagacaacactcaattgatgaattaccacaatttatcaatgtccttaaaggagatatgtcattagttggtccaagaccaattttgctttttgaagcgaaagaatatggggagcgcctctcttacttactgatatgcaaacctggaattactggttattggacaacacatggtcgaagtaaagttctttttcctcaacgagcagatttagagctctattatctccagtaccatagtacaaaaaatgatataaaacttattatgcttacaataaaacaaattctacatggatcggatgcttattaaagtaacattatgaaaaaaaaaacaactaaaatttgcatgatttcttcttctgggggtcatttaaaagagcttaatgaattgatagagatttcagagcagtatgaaacgtttcaaattactgaaaaagataaattttctaatatcaagattggaactaggcaatactatgtgaataaaattgatagagatgaaaaaaattttttatttcatttttttattctttttttgaaaatatttcaaatatttgctgtagagaagcctaaagttatagtaaccactggtgccttagtagcttatccagcatgtctaataggaaaattaatgagagctaaagttatttttatagagtcttatgctcgaacagaaacattatcattaacaggaaaattagtttataggttatctgatttatttattgttcaatggccagatctttcaaaaaaatattctaaagctaaatactatggggaattattctgatgatattaataatattagggactcaaaaatttcaattcaaccgacttataaaaaaagttgataaattaatagaagatgatcaaatcaaagattctgtaatagctcaaatcggatattctaattacaaacctataaattataaattttcagatttttttgatcaatcggaatttgattcattaataaataaatcagatataataataactcatggaggagtaggtgggatagtttcttccttaaaaaagaataaaaaaatcatagtagttccgcgtttaaagaaatacagagaacatattgatgatcatcaattagagatagcaagggcgtttcaaagaaaaaatctagttattttaaacgagaatctaaatgaactatgtaatgatatatctaaaattgaatcattcgagccaatacactatgtcaaagataataaaaaaattatatgtgaaataaaaaaatttatatcgaaagttaaatgatatttttatacaaaattatcttatgatgagaaaggactttttaaaagataaaaaatgataaaattgagcattataattccaatttataacgtggaaaaatatttaagtaaatgtttaaattctattttagaacaaacttataaagaaatagaaataatattagtaaatgatggtagtactgataactcaaaagatatagctgtaagctattgtgaaagatttcctaatgtttttaaatattttgagaaagataacggaggcctctcttcagccagaaattttggacttgaaaaaatttctggtgattttgtaggcttcttagactcagatgactatatagataacgatttatatgaaattatgattaattcattggatagttcaataaaaattgtggaatgtgattttatatgggaatacgaaaatggaaaaagtgtccttgataaaacatctgaatataattctatcaaagacttaatggttaacggtagagttgttgcttggaataaaatatataatgttgaatggttagaaaaaataaacataaagtttaaagaaggtctattgtatgaagatttaaattttttcttcaaaattgttcctcacttgactagtatttcagaagtatcaacagttaaaaatagttttgttcactatgtccagcataaaggtacaataacttcagataattctcttaatatcttggatatcataaaatcttacgaagatgtctttcattattataacgaaaaacagattaatgatttatattttgatgagctagaatataaattttctaggaacttaatgggggcatttttaaaaagagcaattaagattaaagataaaagacaacgtaaaataattttagatgaattttggaataatgttttatcttactatccgaattggaaaaaaaataaatatataaaaaaactatcaaaacagaatatacttttattttttattaataaatatacatataaattattttatttattataaaaaaaatttaatattagagtatttgtattagttgcaatgaaaatatcgaaagtagaataaatgatttatgtagaaataaggggaaacttaggtaatcaattatttatctatgccaccgcaaaaaaaattcaaaagttaaccggacaaaaaattcaattaaatacaacaactttaaataaatactttccaaattacaagtttggcctttcagaatttataatggaggatcctgattgttttattgaatcctataaaaaattaccctggttcacaaacgagtatctcttacctattaaaatttttaaaaaaatattgaataaaacacccaaaattaataaaatcctttcagatttttttttcaaagcttttgaaaaaaaaggatattttatttggcgaggagagacttttaaaaagttttctttaggaaatcataaaaattactatttatcaggtttttggcaatcggaagaatatttttatgatataagggatgaattattagaaatcatcactcctataaattcaataagagagtgtaactttgaacttctcaatttaataagtaattcagaatcaatttgtgtttcaatacgccgaggagattatgtagataatcctaaaatatcagctatttataacgtatgtgatataaattattttatagaatctgtaaatgaaataaagaaaaatgttgtgaatgttaaagttatctgtttttcagatgatgttgaatgggtcaaaaaaaatataaaattcgactgtgaaacacattatgaaacttatggtaattctttatctgaaaaagttcaacttatgtcttcttgtaaacattttgttttatctaatagttcttttagttggtggacagaatttttatctatacgaggtgggattactatagcccccaaaaattggtatgcagatgaacgtgaagctgatatctatagaaaaaattggatttacttagaagataagacagaggaagagtaatgggatttctatttttaactataatacttattttgtgggggtatagttttaccaatataaaaataagcccttttagtattttattcatgagtttagggatcttttactctcaatttacttcaataaatattgacttaataataaaagtactttttttgataacttccataatttatcttattaaagataaatattcaaaaaaatacgttttttctttattattaattgcagtattaattttaattgagtcaactagtccctctaaatttaatcaatattatggttttattgatgctttgacatcatttgcaaccttctcaacaggcatacttctattttccataaaatttagtttacaagaacgcagaagtattttaaaatcaatttcatatttgccaatcttttcagtgttaattggaatccctctaacttttggtggttttatatctatgacagctagaggaggaattgccctttcaggagcagctttagaaacaaatttatcttttttttcagttctaagccttgtttcattagatattttatatcaggacactcgttctaataaatatcaaattttaaaaattattaactttatattgctatgttgtactttaacacgaggcggtattatttctggaattatcattattttaccaagtttactatttcttttaaaaaaaggatttaaaggagtaagacaatttatttttttgattattactatttttgggagtatttatccgcttattttattgtggaaaagtattagtgagaggactttcagtgcagatggtattaatacttcaggtcgatatacggcctgggactatattgtgaatttgacaacaaacaaatctcagggaatgggattgggaagtttaaagacattaactgaggatattaatttacgtgcctttactgctgctcataatacatatattcaattttattatgaaactggttatttgggagtaacactattatctattttatttattttaatattaataataatcctaaaattgactaattatagaaaaaaaatcatttacttaacattcatttcatttttagtatatagttatacagataattgtattgttaataatagatactggtatttgtttatgtttattataggatgttttaaatattttgacagaaaggaagaaaatgcgctactttaaaatattatttgagattattcaactattggtagctagtattttatgtagattatataaaaatccaaatgatatctggctaataaatgaaaaacctgatgaagctagagataatggttatgctttttatcaatatttaagaaagaatttccccgatattaaagtttattatgtaatcagtaaagagtctactgatatttataagtttgataatgaaactaacattgtattttataagagttttttacattttattttatatatcaaatctaaagttttaattagttctcaaacattgccctatccatctagcagaaaattatgtgaagcgctaatgtaccttaatttgaataaaccaaagaggatttggttacaacatggagttactaaagataaactcccatatgagaatatggcaagggaaatttttaagtatgatttaataacctgtgtttcattaaaagaggctaattttataatgaaagaatatggatataatgaagatcaggtgaaggctcttggatttgcaagatatgataatttgccaattggaaataataacacatttgatatacttataatgcctactttccgtaagggttacgagattaaaaattttagtctcccaacagatagtgaaactaaacattttgaggaaagtgtattctttaaaacatatgttgatttattgaattctgaagagctagacgagtatttagaaaagtctggtaaaaaagcaattttttatttacactatgcttttcaaccatatgcaaaatctttttctaaacgactaatgtcttcaaatgttatcattgctgaaagaacagaatatgatgttcaaaaactattaattaattgtgaattgctaattacagattattcaagcgttttttttgatttttcatatatgaaaaaacctgaaatatttttccattttgatgagaaagaatatagaagtaatcattatagggagggatattttgattataaaacagatggatttggtccagtagttaattctaaagaagaattactaactgaaatcaaagagtttattgataacccatctctgttaatggaatttaataagcgagctaataatttcttcaaatatactgataacaataattgccaacgtattttaaaagaaatttggagaattaatgaaactaattaagaattatttaatgacaagctcttatcaattgttaattattatcttaccaataataacaacaccatatatatcgagagtacttagtccagaagggattggactttattcatatacttatactattacacagtatttcgtattatttgctactcttggtactgttacgtatggtagcagagagatagcatattatcagtcaaataaacaaaagagaagtgaaattttttggggaattaccttccttagctgggctactggtgctatatcacttttaatattttatatatttattttttttaatggcaaatatagtgttttatttttttggcaaagctttttgatttttggagttatttttgatattaattggtatttcacaggaatggaaaagttcaaggttattatttcacgtaacttttgtataaaaattattagtttattgtgtatttttgtctttgtaaaatctgagaaagatttaagtttatatatagttatactaggattgagcaatataataggtaatatattagtttggccatatttgagaaaagaggtttataaacctaatttttctaagttatcattcaaaaaacatttgggaagtacatggatattttttttgccacaaacttctgttactttaaactcattaataaaccaaaatatgattgcatattttgactcaataacaagcttaggatactttacacaaacaaataagtttactgtgattgcgatttcaatagttatttcaattgggactgttatgttgcctagaatgtccaatttagttgcgcgcaaagagtattcaaagtttacagactatgttactaagagtattaatataagctcaggaatttctatagcaataatgtttggtttaatggctatagcacctaagtttacaactttttttttaggagctcaatataaatttgttattcatttgctagttttatcatcaccgatagtggttttagtaacctggagtaatgttcttggtcaacaatatttaatacctttaaataggatgaaaatatttacaaaatctctaatttgtggaaacttagtaaatgtttctctaaacttgattttgttacccaaaatgggagtagaaatttcaataataaatcagttaattaatgaaattattattgtaggtattcaatttatatcagttagaaaagagttaaaaataaatataatattaggagatctaataaaatatttttttgcgggtataattatgtttattgccgttttatatctgaatttacaattaccgatgactatcttcacactacttatagagattggtattggagttcttatatattcaatgctagttatttctcttaaaactggattatataaagaattgaaaaagattattaaaattcgttagcttaaaatctatcacctttcatttgagtagtaagaaatacaaagctttattataaaatttatcatttttaagactatcataaaagaagaaggatgacatggaacgaaaaaagaagaaaaaaaaaatatatataattattctaatattattaatgtttatcactattgtttgttttgggggatatgctacacgagagttaattactcccactgaaaaaacaataccaaatgtctcggatcaacctaaaaaaacttcggcctctaacggttatgtagagcaaaaaggggaagaagctgctgtgggtagtatagcacttgtagacgatgctggtgtaccagaatgggttaaagttccctcaaaggtaaatctagataaatttactgatttatctacgaataatatcactatttatcgaattaataatccggaagtcttaaaaacagttaccaatcgtacagatcaacggatgaaaatgtcagaagttatagctaagtatcctaatgctttgattatgaatgcttccgcttttgatatgcagacaggacaagtagctggatttcaaattaataatggaaagttgattcaagactggagtccaggtacaacgactcaatatgcttttgttattaacaaagatggttcgtgcaaaatttatgattcaagtacacctgctttaactattattaaaaatggagggcaacaagcctatgattttggtactgcgattatccgtgatggtaaaattcaaccaagtgatggctcagtagattggaagattcatatttttattgcgaatgataaagataataatctctatgctattttgagtgatacaaatgcaggttatgataatataataaaatcagtatcaaatttgaagctccaaaatatgttattacttgatagtggtggctcaagtcaactatctgtcaatggtaaaacgattgttgctagtcaagatgatcgagccgtaccggattatattgtgatgaaataaaaataaaagaacctcatggttcttttattttagagatttttcaaaaagggttttgactgagtctaattctgtttgagaaacgaccttagctccattttcatctgttgtatgtagattgagcttgctggtattctttagagccttactgtagctcataacgatcgttttagcatcattgaaacttatattggttttaacagtgtttgaaaaagcatagagaatttctcgatagtaattgaaactttcaagttttttcatatgagcaattttttgaatatttccgtagagttccattgagacattttgaatccgagtgattgaagcatccaaatcagtatcgtcaatttgtgtcatataggcttggacttgatcagcagtttgtaaattaacagttccttgtttaaactcataaccttcagccttgaatgcctttggattttgcatggtgattccaccagtggcctgtacaagtgatcccattttattaacatcgatctgaattactttgttaatggacgcattcaataggtctttaaccatctggaaaattccatcatctccattcgtattgtaaacttcagtgattgttttttgattaggcattgtcgcaaaaactgggaagttcatgaaagtagtttgatttgtctttacattcgttgaagctaaaacagtagcataagctgaatttttagaattatttttaccagttgcaatgataagtgtggtgaatgttttagctttttttaagtcaatacttgttgttttagggaaattttcatatgatgttgaaaaggttgattcaacatttctataagctacgtaggctatagaagcaacagaaataattactaatacaaaaataattgaaataacttttagtactgtgtattttttcttacgataatgacgcctctttttttgattcat

SEQ ID NO: 294 - DNA, 12651 bp, Lactococcus lactis
  Eps gene cluster of 33225
atgaatgatttattttaccatcgtctaaaggaactagttgaatcaagtggtaaatctgcaaatcaaatagaaagggaattgggttaccctagaaattctttgaataattataagttgggaggagaaccctctgggacaagattaataggacaatcagagtattttaatgtgtctccaaaatatctgatgggtataagtgatgagcctaatgacagttctgcaattaatctttttaaaactctaactcaagaagagaaaaaagaaatgtttataatttgtcaaaaatggctttttttagaatatcaaatagagttataacaataataaatttagggagtttttcttattaatatgatgaaaaaaggaatttttgtaattactatagtgatatctatagcattgataattggaggttttttatagttataattctaggataaataatctttcaaaagctgataaaggaaaagaagttgtaaaaaatagcagtgaaaaaaatcagatagaccttacctataaaaagtattataaaaatttaccaaaatcagttcaaaataaaatagatgatatttcatccaaaaataaagaagttactttaacttgtatttggcaatctgattcagttatttctgaacaatttcaacaaaacttacaaaaatattatggaaataagttttggaacatcaaaaatatcacctacaatggcgaaacaagtgaacaattattggctgaaaaagttcaaaatcaagtattggcgactaaccctgatgttgttttatatgaagctccactttttaatgataaccaatatagactactgggctagttacccagacaaaaattctgatgaaatgaaggggctgttttctgatgatggagtatatagaacattaaatgcttcggggaataaggtttggctagattatattactaaatattttacagcaaactaattaagttataaataacaattattaaatattggagaagaaatgcaggaaacacaggaacagacgattgatttaagagggatttttaaaattattcgcaaaaggttaggtttaatattatttagtgctttaatagtcacaatattagggagcatctacacattttttatagcctccccagtttacacagcctcaactcaacttgtcgttaaactaccaaattcggataattcagcagcctacgctggagaagtgaccgggaatattcaaatggcgaacacaattaaccaagttattgttagtccagtcattttagataaagttcaaagtaatttaaatctatctgatgactctttccaaaaacaagttacagcagcaaatcaaacaaattcacaagttattatgcttactgttaaatattctaatccttacattgcaaaaaagattgcagacgagactgctaaaatttttagttcagatgcagcaaaactattgaatgttactaacgttaatattctatccaaagcaaaagctcaaacaacaccaattagtcctaaacctaaattgtatttagcgatatctgttatagccggactagttttaggtttagccattgctttattgaaggaattgtttgataacaaaattaataaagaagaagatattgaagctctggggctcacggttcttggtgtaacaagctatgatcaaatgagtgattttaataagaatacaaataaaaatggcacgcaatcgggaactaagtcaagtccgcctagcgaccatgaagtaaatagatcatcaaaaaggaataaaagataggagttcaggatggctaaaaataaaagaagcatagacaataatcattatattattaccagtgtcaatcctcaatcacctatttccgaacaatatcgtacgattcgtacgaccattgattttaaaatggcggatcaaggaattaaaagttttctagtaacatcttcagaaacagatgaaggtaaaacaaccgtaagtgctaatatagctgttgcttttgcacaacaaggtaaaaaagtacttttaattgatggcgatcttcgtaaaccgactgttaacattacttttaaagtacaaaatagagtaggattaaccaatattttaatgcatcaatcttcgattgaagatgccatacaagggacaagactttctgaaaatcttacaataattacctctggtccaattccacctaatccatcggaattattagcatctagtgcaatgaagaatttgattgactctgtgtccgatttctttgatgttgttttgattgatattccacctctctctgcagttactgatgctcaaattttgagtagttatgtaggaggagtggttcttgttgtacgtgcctatgaaacaaaaaaagagagtttagcaaaaacaaaaaaaaagctggaacaagttaatgcaaatatattaggagttgttttgcatggggtagactcttctgactcaccgtcgtattactactacggagtagagtaattggaataaattttaatcaaataaaagacagaaatttgtagaagaggagagcaaatgattgatattcattgccatattttaccgggtatagatgatggagctaaaacttctggagatactttgacaatgctgaaatcagcaattgatgaagggataacaaccatcaccgctactcctcatcataatcctcaatttaataatgaatcaccacttattttaaaaaaagttaaggaagttcaaaatatcattgacgagcatcaattaccaattgaagttttgcctggacaagaggttagaatatatggtgatttattaaaagaattttctgaaggaaagttactgaaagcagcgggcacttcaagttatatattgattgaatttccatcaaatcatgtgccagcttatgctaaagaacttttttataatattaaattggagggccttcaacctattttggtccaccctgagcgtaatagtggaatcattgagaaccctgatatattatttgattttattgaacaaggagtactaagtcagataacagcttcaagtgtcactggtcattttggtaaaaaaatacaaaagctatcatttaaaatgatagaaaaccatcttacgcattttgttgcatcagatgcgcataatgtgacgtcacgtgcatttaagatgaaggaagcatttgaaattattgaagatagttatggttctggtgtatcacgaatgttacaaaataatgcagactcggtgattttgaacgaaagtttttatcaagaagaaccaataaaaattaaaacaaagaaatttttgggattattttaaaaggattaaatggagtaaataatggaagtttttgaggcatcatctgaactggaagagcctaagttagtagaattaaaaaaattttctcgcagagagataattataaaaagagggattgatattttagggggattagcgggttcaggtttatttcttatcgcggctgcattgctttatgtcccttacaaaatgagctcaaaaaaagatcaagggccaatgttctataaacaaaaacggtatggaaaaaatggtaaaattttttatattttgaaatttagaacaatgataattaatgctgagcagtatttagagctacatccagaagttaaagccgcctatcatgccaatggcaataaactagaaagtgatccccgtgtaacgaagattgggtcatttattagacaacactcaattgatgaattaccacaatttatcaatgtccttaaaggagatatgtcattagttggtccaagaccaattttgctttttgaagcgaaagaatatggggagcgcctctcttacttactgatatgcaaacctggaattactggttattggacaacacatggtcgaagtaaagttctttttcctcaacgagcagatttagagctctattatctccagtaccatagtacaaaaaatgatataaaacttattatgcttacaataaaacaaattctacatggatcggatgcttattaaagtaacattatgaaaaaaaaaacaactaaaatttgcatgatttcttcttctgggggtcatttaaaagagcttaatgaattgatagagatttcagagcagtatgaaacgtttcaaattactgaaaaagataaattttctaatatcaagattggaactaggcaatactatgtgaataaaattgatagagatgaaaaaaattttttatttcatttttttattctttttttgaaaatatttcaaatatttgctgtagagaagcctaaagttatagtaaccactggtgccttagtagcttatccagcatgtctaataggaaaattaatgagagctaaagttatttttatagagtcttatgctcgaacagaaacattatcattaacaggaaaattagtttataggttatctgatttatttattgttcaatggccagatctttcaaaaaaatattctaaagctaaatactatggggaattattctgatgatattaataatattagggactcaaaaatttcaattcaaccgacttataaaaaaagttgataaattaatagaagatgatcaaatcaaagattctgtaatagctcaaatcggatattctaattacaaacctataaattataaattttcagatttttttgatcaatcggaatttgattcattaataaataaatcagatataataataactcatggaggagtaggtgggatagtttcttccttaaaaaagaataaaaaaatcatagtagttccgcgtttaaagaaatacagagaacatattgatgatcatcaattagagatagcaagggcgtttcaaagaaaaaatctagttattttaaacgagaatctaaatgaactatgtaatgatatatctaaaattgaatcattcgagccaatacactatgtcaaagataataaaaaaattatatgtgaaataaaaaaatttatatcgaaagttaaatgatatttttatacaaaattatcttatgatgagaaaggactttttaaaagataaaaaatgataaaattgagcattataattccaatttataacgtggaaaaatatttaagtaaatgtttaaattctattttagaacaaacttataaagaaatagaaataatattagtaaatgatggtagtactgataactcaaaagatatagctgtaagctattgtgaaagatttcctaatgtttttaaatattttgagaaagataacggaggcctctcttcagccagaaattttggacttgaaaaaatttctggtgattttgtaggcttcttagactcagatgactatatagataacgatttatatgaaattatgattaattcattggatagttcaataaaaattgtggaatgtgattttatatgggaatacgaaaatggaaaaagtgtccttgataaaacatctgaatataattctatcaaagacttaatggttaacggtagagttgttgcttggaataaaatatataatgttgaatggttagaaaaaataaacataaagtttaaagaaggtctattgtatgaagatttaaattttttcttcaaaattgttcctcacttgactagtatttcagaagtatcaacagttaaaaatagttttgttcactatgtccagcataaaggtacaataacttcagataattctcttaatatcttggatatcataaaatcttacgaagatgtctttcattattataacgaaaaacagattaatgatttatattttgatgagctagaatataaattttctaggaacttaatgggggcatttttaaaaagagcaattaagattaaagataaaagacaacgtaaaataattttagatgaattttggaataatgttttatcttactatccgaattggaaaaaaaataaatatataaaaaaactatcaaaacagaatatacttttattttttattaataaatatacatataaattattttatttattataaaaaaaatttaatattagagtatttgtattagttgcaatgaaaatatcgaaagtagaataaatgatttatgtagaaataaggggaaacttaggtaatcaattatttatctatgccaccgcaaaaaaaattcaaaagttaaccggacaaaaaattcaattaaatacaacaactttaaataaatactttccaaattacaagtttggcctttcagaatttataatggaggatcctgattgttttattgaatcctataaaaaattaccctggttcacaaacgagtatctcttacctattaaaatttttaaaaaaatattgaataaaacacccaaaattaataaaatcctttcagatttttttttcaaagcttttgaaaaaaaaggatattttatttggcgaggagagacttttaaaaagttttctttaggaaatcataaaaattactatttatcaggtttttggcaatcggaagaatatttttatgatataagggatgaattattagaaatcatcactcctataaattcaataagagagtgtaactttgaacttctcaatttaataaggaattcagaatcaatttgtgtttcaatacgccgaggagattatgtagataatcctaaaatatcagctatttataacgtatgtgatataaattattttatagaatctgtaaatgaaataaagaaaaatgttgtgaatgttaaagttatctgtttttcagatgatgttgaatgggtcaaaaaaaatataaaattcgactgtgaaacacattatgaaacttatggtaattctttatctgaaaaagttcaacttatgtcttcttgtaaacattttgttttatctaatagttcttttagttggtggacagaatttttatctatacgaggtgggattactatagcccccaaaaattggtatgcagatgaacgtgaagctgatatctatagaaaaaattggatttacttagaagataagacagaggaagagtaatgggatttctatttttaactataatacttattttgtgggggtatagttttaccaatataaaaataagcccttttagtattttattcatgagtttagggatcttttactctcaatttacttcaataaatattgacttaataataaaagtactttttttgataacttccataatttatcttattaaagataaatattcaaaaaaatacgttttttctttattattaattgcagtattaattttaattgagtcaactagtccctctaaatttaatcaatattatggttttattgatgctttgacatcatttgcaaccttctcaacaggcatacttctattttccataaaatttagtttacaagaacgcagaagtattttaaaatcaatttcatatttgccaatcttttcagtgttaattggaatccctctaacttttggtggttttatatctatgacagctagaggaggaattgccctttcaggagcagctttagaaacaaatttatcttttttttcagttctaagccttgtttcattagatattttatatcaggacactcgttctaataaatatcaaattttaaaaattattaactttatattgctatgttgtactttaacacgaggcggtattatttctggaattatcattattttaccaagtttactatttcttttaaaaaaaggatttaaaggagtaagacaatttatttttttgattattactatttttgggagtatttatccgcttattttattgtggaaaagtattagtgagaggactttcagtgcagatggtattaatacttcaggtcgatatacggcctgggactatattgtgaatttgacaacaaacaaatctcagggaatgggattgggaagtttaaagacattaactgaggatattaatttacgtgcctttactgctgctcataatacatatattcaattttattatgaaactggttatttgggagtaacactattatctattttatttattttaatattaataataatcctaaaattgactaattatagaaaaaaaatcatttacttaacattcatttcatttttagtatatagttatacagataattgtattgttaataatagatactggtatttgtttatgtttattataggatgttttaaatattttgacagaaaggaagaaaatgcgctactttaaaatattatttgagattattcaactattggtagctagtattttatgtagattatataaaaatccaaatgatatctggctaataaatgaaaaacctgatgaagctagagataatggttatgctttttatcaatatttaagaaagaatttccccgatattaaagtttattatgtaatcagtaaagagtctactgatatttataagtttgataatgaaactaacattgtattttataagagttttttacattttattttatatatcaaatctaaagttttaattagttctcaaacattgccctatccatctagcagaaaattatgtgaagcgctaatgtaccttaatttgaataaaccaaagaggatttggttacaacatggagttactaaagataaactcccatatgagaatatggcaagggaaatttttaagtatgatttaataacctgtgtttcattaaaagaggctaattttataatgaaagaatatggatataatgaagatcaggtgaaggctcttggatttgcaagatatgataatttgccaattggaaataataacacatttgatatacttataatgcctactttccgtaagggttacgagattaaaaattttagtctcccaacagatagtgaaactaaacattttgaggaaagtgtattctttaaaacatatgttgatttattgaattctgaagagctagacgagtatttagaaaagtctggtaaaaaagcaattttttatttacactatgcttttcaaccatatgcaaaatctttttctaaacgactaatgtcttcaaatgttatcattgctgaaagaacagaatatgatgttcaaaaactattaattaattgtgaattgctaattacagattattcaagcgttttttttgatttttcatatatgaaaaaacctgaaatatttttccattttgatgagaaagaatatagaagtaatcattatagggagggatattttgattataaaacagatggatttggtccagtagttaattctaaagaagaattactaactgaaatcaaagagtttattgataacccatctctgttaatggaatttaataagcgagctaataatttcttcaaatatactgataacaataattgccaacgtattttaaaagaaatttggagaattaatgaaactaattaagaattatttaatgacaagctcttatcaattgttaattattatcttaccaataataacaacaccatatatatcgagagtacttagtccagaagggattggactttattcatatacttatactattacacagtatttcgtattatttgctactcttggtactgttacgtatggtagcagagagatagcatattatcagtcaaataaacaaaagagaagtgaaattttttggggaattaccttccttagctgggctactggtgctatatcacttttaatattttatatatttattttttttaatggcaaatatagtgttttatttttttggcaaagctttttgatttttggagttatttttgatattaattggtatttcacaggaatggaaaagttcaaggttattatttcacgtaacttttgtataaaaattattagtttattgtgtatttttgtctttgtaaaatctgagaaagatttaagtttatatatagttatactaggattgagcaatataataggtaatatattagtttggccatatttgagaaaagaggtttataaacctaatttttctaagttatcattcaaaaaacatttgggaagtacatggatattttttttgccacaaacttctgttactttaaactcattaataaaccaaaatatgattgcatattttgactcaataacaagcttaggatactttacacaaacaaataagtttactgtgattgcgatttcaatagttatttcaattgggactgttatgttgcctagaatgtccaatttagttgcgcgcaaagagtattcaaagtttacagactatgttactaagagtattaatataagctcaggaatttctatagcaataatgtttggtttaatggctatagcacctaagtttacaactttttttttaggagctcaatataaatttgttattcatttgctagttttatcatcaccgatagtggttttagtaacctggagtaatgttcttggtcaacaatatttaatacctttaaataggatgaaaatatttacaaaatctctaatttgtggaaacttagtaaatgtttctctaaacttgattttgttacccaaaatgggagtagaaatttcaataataaatcagttaattaatgaaattattattgtaggtattcaatttatatcagttagaaaagagttaaaaataaatataatattaggagatctaataaaatatttttttgcgggtataattatgtttattgccgttttatatctgaatttacaattaccgatgactatcttcacactacttatagagattggtattggagttcttatatattcaatgctagttatttctcttaaaactggattatataaagaattgaaaaagattattaaaattcgttagcttaaaatctatcacctttcatttgagtagtaagaaatacaaagctttattataaaatttatcatttttaagactatcataaaagaagaaggatgacatggaacgaaaaaagaagaaaaaaaaaatatatataattattctaatattattaatgtttatcactattgtttgttttgggggatatgctacacgagagttaattactcccactgaaaaaacaataccaaatgtctcggatcaacctaaaaaaacttcggcctctaacggttatgtagagcaaaaaggggaagaagctgctgtgggtagtatagcacttgtagacgatgctggtgtaccagaatgggttaaagttccctcaaaggtaaatctagataaatttactgatttatctacgaataatatcactatttatcgaattaataatccggaagtcttaaaaacagttaccaatcgtacagatcaacggatgaaaatgtcagaagttatagctaagtatcctaatgctttgattatgaatgcttccgcttttgatatgcagacaggacaagtagctggatttcaaattaataatggaaagttgattcaagactggagtccaggtacaacgactcaatatgcttttgttattaacaaagatggttcgtgcaaaatttatgattcaagtacacctgctttaactattattaaaaatggagggcaacaagcctatgattttggtactgcgattatccgtgatggtaaaattcaaccaagtgatggctcagtagattggaagattcatatttttattgcgaatgataaagataataatctctatgctattttgagtgatacaaatgcaggttatgataatataataaaatcagtatcaaatttgaagctccaaaatatgttattacttgatagtggtggctcaagtcaactatctgtcaatggtaaaacgattgttgctagtcaagatgatcgagccgtaccggattatattgtgatgaaataaaaataaaagaacctcatggttcttttattttagagatttttcaaaaagggttttgactgagtctaattctgtttgagaaacgaccttagctccattttcatctgttgtatgtagattgagcttgctggtattctttagagccttactgtagctcataacgatcgttttagcatcattgaaacttatattggttttaacagtgtttgaaaaagcatagagaatttctcgatagtaattgaaactttcaagttttttcatatgagcaattttttgaatatttccgtagagttccattgagacattttgaatccgagtgattgaagcatccaaatcagtatcgtcaatttgtgtcatataggcttggacttgatcagcagtttgtaaattaacagttccttgtttaaactcataaccttcagccttgaatgcctttggattttgcatggtgattccaccagtggcctgtacaagtgatcccattttattaacatcgatctgaattactttgttaatggacgcattcaataggtctttaaccatctggaaaattccatcatctccattcgtattgtaaacttcagtgattgttttttgattaggcattgtcgcaaaaactgggaagttcatgaaagtagtttgatttgtctttacattcgttgaagctaaaacagtagcataagctgaatttttagaattatttttaccagttgcaatgataagtgtggtgaatgttttagctttttttaagtcaatacttgttgttttagggaaattttcatatgatgttgaaaaggttgattcaacatttctataagctacgtaggctatagaagcaacagaaataattactaatacaaaaataattgaaataacttttagtactgtgtattttttcttacgataatgacgcctctttttttgattcat
